(19) United States
(12) Patent Application Publication
(10) Pub. No.: US 2020/0405890 A1
(43) Pub. Date: Dec. 31, 2020

(54) POSITRON EMISSION TOMOGRAPHY IMAGING OF ACTIVATABLE BINDING POLYPEPTIDES AND RELATED COMPOSITIONS THEREOF

(71) Applicant: CytomX Therapeutics, Inc., South San Francisco, CA (US)

(72) Inventors: Olga VASILJEVA, Fremont, CA (US); Emma Geertruida Elisabeth DE VRIES, Groningen (NL); Marjolijn N. LUB-DE HOOGE, Groningen (NL); Annelies JORRITSMA-SMIT, Groningen (NL); Martin POOL, Groningen (NL); Danique GIESEN, Groningen (NL); Iris KOK, Groningen (NL); Linda BROER, Groningen (NL); Mark STROH, San Francisco, CA (US)

(21) Appl. No.: 16/971,671

(22) PCT Filed: Feb. 21, 2019
(86) PCT No.: PCT/US2019/019045

§ 371 Date: Aug. 20, 2020

Related U.S. Application Data
(60) Provisional application No. 62/680,416, filed on Jun. 4, 2018.
(60) Provisional application No. 62/656,752, filed on Apr. 12, 2018.
(60) Provisional application No. 62/633,536, filed on Feb. 21, 2018.

(51) Int. Cl. A61K 51/10; C07K 16/28

(52) U.S. Cl. CPC A61K 51/1027; A61K 51/1093; C07K 2317/515; C07K 2317/51; C07K 16/2827

(57) ABSTRACT

The present invention provides methods, compounds, and compositions useful for determining the biodistribution of an activated binding polypeptide in a mammalian subject. The present invention also provides methods for identifying mammalian subjects suitable for treatment with an activatable binding polypeptide.

### CROSS-REFERENCE TO RELATED APPLICATIONS

[0001] This application claims the benefit of provisional applications U.S. Ser. No. 62/633,536, filed Feb. 21, 2018, U.S. Ser. No. 62/656,752, filed Apr. 12, 2018, and U.S. Ser. No. 62/680,416, filed Jun. 4, 2018, pursuant 35 U.S.C. § 119(e), each of which is incorporated herein by reference in its entirety.

### FIELD OF THE INVENTION

[0002] The present invention relates to novel compounds, compositions, and related methods for detecting the in vivo distribution of activatable binding polypeptides in a subject, as well as identifying subjects suitable for treatment with an activatable binding polypeptide.

### REFERENCE TO SEQUENCE LISTING

[0003] The “Sequence Listing” submitted electronically concurrently herewith pursuant 37 C.F.R. § 1.821 in computer readable form (CRF) via EFS-Web as file name CYTX_047_PCT_ST25.txt is incorporated herein by reference. The electronic copy of the Sequence Listing was created on Feb. 21, 2019, and the size on disk is 708 kilobytes.

### BACKGROUND

[0004] Antibody-based therapies have proven to be effective in the treatment of several diseases, but in some cases, toxicities due to broad target expression have limited their therapeutic effectiveness. Other limitations such as rapid clearance from the circulation following administration further hinder their effective use as a therapy. Activatable antibodies are designed to selectively activate and bind when exposed to the microenvironment of a target tissue, thus potentially reducing toxicities associated with antibody binding to widely expressed binding targets.

[0005] Methods for assessing the potential therapeutic benefit of activatable antibodies are desired.

### SUMMARY OF THE INVENTION

[0006] In one aspect, the present invention is directed to a method for detecting an in vivo distribution of an activated binding polypeptide in a subject, the method comprising:

[0007] administrating to a mammalian subject a tracer dose of a radiolabeled activatable binding polypeptide,
[0008] wherein the radiolabeled activatable binding polypeptide comprises a radionuclide and an activatable binding polypeptide.
   [0009] wherein the activatable binding polypeptide comprises a prodomain and a binding moiety, wherein the prodomain comprises a masking moiety and a cleavable moiety.
   [0010] wherein, when the radiolabeled activatable binding polypeptide is activated, a radiolabeled activated binding polypeptide is generated that is capable of specifically binding, in vivo, a biological target; and

[0011] imaging the mammalian subject using positron emission tomography (PET) at a time point following administration of the tracer dose.

[0012] In one embodiment, the radionuclide is ⁸⁹Zr. In some embodiments, the activatable binding polypeptide is an activatable antibody.

[0013] In another aspect, the present invention further provides a method for identifying a mammalian subject suitable for treatment with an activatable binding polypeptide, the method comprising:

[0014] detecting the in vivo distribution of a radiolabeled activated binding polypeptide in a mammalian subject in accordance with the methods described herein, and

[0015] identifying the mammalian subject as being suitable for treatment with the corresponding unlabeled activatable binding polypeptide if the radionuclide is detectably present within the PET image of the tumor.

[0016] In a further aspect, the present invention provides a method of treating a mammalian subject with an activatable binding polypeptide, the method comprising:

[0017] identifying a mammalian subject suitable for treatment with an activatable binding polypeptide in accordance with the methods described herein; and

[0018] administering to the mammalian subject a therapeutically effective dose of the activatable binding polypeptide.

[0019] In a still further aspect, the present invention provides an 89Zr-conjugated activatable binding polypeptide,

[0020] wherein the ⁸⁹Zr-conjugated activatable binding polypeptide comprises 89Zr conjugated via a chelation moiety to an activatable binding polypeptide,

[0021] wherein the activatable binding polypeptide comprises a prodomain and a binding moiety, wherein the prodomain comprises a masking moiety and a cleavable moiety,

[0022] wherein, when the ⁸⁹Zr-conjugated activatable binding polypeptide is activated, an ⁸⁹Zr-conjugated activated binding polypeptide is generated that is capable of specifically binding, in vivo, a biological target.

[0023] In a further aspect, the present invention is directed to a stable composition comprising an ⁸⁹Zr-conjugated activatable binding polypeptide as described herein and a liquid phase carrier, wherein at least one property selected from the group consisting of percent (%) aggregates, concentration of the ⁸⁹Zr-conjugated activatable binding polypeptide, pH, and radiochemical purity is stable after storage at a temperature in the range of from about 2 to about 8° C. for a period of at least about 1 month, at least about 3 months, at least about 6 months, and at least about 12 months.

### BRIEF DESCRIPTION OF THE FIGURES

[0024] FIG. 1 provides a schematic overview of the protocol followed in the in vivo murine study described in Example 1.

[0025] FIG. 2A provides representative MicroPET images at 1 day (24 h), 3 days (72 h), and 6 days (144 h) post injection (p.i.) of 10 μg of ⁸⁹Zr-CX-072 (radiolabeled activatable antibody), ⁸⁹Zr-PBCtrl (radiolabeled non-binding control), and ⁸⁹Zr-CX-075 (radiolabeled parental antibody) in MDA-MB-231 xenograft bearing Balb-c/nude mice. Tracer uptake is presented as standardized uptake value (SUV). On the right, maximum intensity projections (MIPs) are presented at 6 days p.i. H: heart; T: tumor; S: spleen; L: lymph node. At 24 h, most uptake is in the heart (H) and other tissue for both tracers. Over time, relative uptake in the tumor (T) increases for ⁸⁹Zr-CX-072, but not for ⁸⁹Zr-PBCtrl.

[0026] FIGS. 2B, 2C, and 2D provide the quantification of ⁸⁹Zr-CX-072, ⁸⁹Zr-PbCtrl, and ⁸⁹Zr-CX-075 uptake, respectively, in MDA-MB-231 tumor, blood pool and spleen at 1, 3, and 6 days post injection (p.i.). The plots provide mean standardized uptake value (SUVₘₑₐₙ) on the left y-axis and tumor-to-blood ratio (TBR) on the right axis. Data is shown as mean 2 standard deviation.

[0027] FIG. 3A depicts tumor uptake of ⁸⁹Zr-CX-072 and ⁸⁹Zr-PBCtrl in MDA-MB-231 xenograft bearing Balb-c/nude mice 6 days (144 h) post-injection (dose) of ⁸⁹Zr-CX-072 and ⁸⁹Zr-PBCtrl for 10 μg supplemented with 0, 40, or 240 μg non-radiolabeled CX-072 or PBCtrl, resulting in a total protein dose of 10, 50, or 250 μg. The data is presented as mean % ID/g±SD, *: p<0.01.

[0028] FIG. 3B provides the quantification of ⁸⁹Zr-CX-072, ⁸⁹Zr-PbCtrl, and ⁸⁹Zr-CX-075 uptake 6 days p.i. in MDA-MB-231 tumor and blood pool at increasing total protein dose. Left: Tracer uptake is presented as mean standardized uptake value (SUVₘₑₐₙ). Right: Tracer uptake in tumor is presented as percentage of injected dose per gram tissue (% ID/g). Data is shown as mean±standard deviation (SD).

[0029] FIG. 3C depicts the ex vivo spleen uptake of ⁸⁹Zr-CX-072, ⁸⁹Zr-PbCtrl, and ⁸⁹Zr-CX-075 at increasing total protein dose. Tracer uptake is presented as % ID/g. Data is shown as mean±SD. **: p<0.01, *: p<0.05; ns: not significant

[0030] FIG. 4A depicts organ biodistribution of 10 μg ⁸⁹Zr-CX-072 and ⁸⁹Zr-PBCtrl in MDA-MB-231 xenograft bearing Balb-c/nude mice 6 days post-injection. Data is presented as mean % ID/g±SD and tumor-to-blood ratio (mean TBR)±SD. **: p<0.01.

[0031] FIG. 4B depicts the ex vivo biodistribution of 10 μg ⁸⁹Zr-CX-072, ⁸⁹Zr-CX-PbCtrl, and ⁸⁹Zr-CX-075 in MDA-MB-231 tumor-bearing mice at 6 days p.i. Tracer uptake per organ is presented as % ID/g. Data is shown as mean±SD. **: p<0.01, *: p<0.05

[0032] FIG. 4C depicts MDA-MB-231 tumor uptake of ⁸⁹Zr-CX072, ⁸⁹Zr-PbCtrl, and ⁸⁹Zr-CX-075 6 days p.i. Tracer uptake is presented as % ID/g. Data is shown as mean±SD. **: p<0.01, ns: not significant.

[0033] FIG. 4D provides a quantification of activated CX-072 in MDA-MB-231 tumor and spleen lysates in a plot of Concentration (ng/mL) (activated CX-072) vs. Total Protein Dose.

[0034] FIG. 4E shows activated CX-072 detected ex vivo in MDA-MB-231 tumor tissue and spleen by Western capillary electrophoresis. Data is shown as mean±SD.

[0035] FIG. 5A provides representative maximum intensity projections of ⁸⁹Zr-CX-072, ⁸⁹Zr-PbCtrl, and ⁸⁹Zr-CX-075 in MC38 tumor-bearing mice imaged at 6 days p.i. H: heart, T: tumor, S: spleen, L: lymph node.

[0036] FIG. 5B depicts organ biodistribution of 10 μg ⁸⁹Zr-CX-072 and ⁸⁹Zr-PBCtrl in MC38 xenograft bearing C57BL/6 mice. Data is presented as mean % ID/g±SD and tumor-to-blood ratio (mean TBR)±SD. *: p<0.05.

[0037] FIG. 5C depicts the quantification of ⁸⁹Zr-CX-072, ⁸⁹Zr-PbCtrl, and ⁸⁹Zr-CX-075 uptake in MC38 tumor, blood pool, and spleen at 6 days p.m. Tracer uptake is presented as mean standardized uptake value (SUVₘₑₐₙ) on the left y-axis. Tumor-to-blood ratio (TBR) is presented on the right y-axis. Data is shown as mean±standard deviation (SD).

[0038] FIG. 5D depicts the ex vivo biodistribution of ⁸⁹Zr-CX-072, ⁸⁹Zr-PbCtrl, and ⁸⁹Zr-CX-075 in MC38 tumor-bearing mice 6 days p.i. Tracer uptake per organ is presented as percentage of injected dose per gram tissue (% ID/g). Data is shown as mean±SD, *: p<0.05, **: p<0.01.

[0039] FIG. 6A depicts ex vivo uptake of ⁸⁹Zr-CX-072, ⁸⁹Zr-PbCtrl, ⁸⁹Zr-CX-075 in lymphoid tissues and MC38 tumor tissue at 6 days p.i. Tracer uptake per organ is presented as % ID/g. Data is shown as mean±SD. *: p<0.05, **: p<0.01, ns: not significant.

[0040] FIG. 6B depicts ex vivo uptake of ⁸⁹Zr-CX-072, ⁸⁹Zr-PbCtrl, ⁸⁹Zr-CX-075 in lymphoid tissues and MC38 tumor tissue at 6 days p.i. Tracer uptake per organ is presented as organ-to-blood ratio. Data is shown as mean±SD. *: p<0.05, **: p<0.01, ns: not significant.

[0041] FIG. 7A provides a plot of concentration of activated ⁸⁹Zr-CX-072 species detected in MDA-MB-231 tumor tissue and spleen as a function of protein dose.

[0042] FIG. 7B depicts the SDS-PAGE autoradiographs of intact (i.e., unactivated activatable antibody) ⁸⁹Zr-CX-072 and ⁸⁹Zr-PbCtrl in MC38 tumor lysates and plasma 6 days post-injection.

### DETAILED DESCRIPTION

[0043] The present invention provides novel compositions comprising radiolabeled activatable binding polypeptides and their use in assessing the biodistribution of the corresponding activated binding polypeptide in a mammalian subject. In one embodiment, the present invention provides a method for detecting an in vivo distribution of an activated binding polypeptide in a mammalian subject, the method comprising:

[0044] administrating to a mammalian subject a tracer dose of a radiolabeled activatable binding polypeptide,
[0045] wherein the radiolabeled activatable binding polypeptide comprises a radionuclide and an activatable binding polypeptide,
   [0046] wherein the activatable binding polypeptide comprises a prodomain and a binding moiety, wherein the prodomain comprises a masking moiety and a cleavable moiety,
   [0047] wherein, when the radiolabeled activatable binding polypeptide is activated, a radiolabeled activated binding polypeptide is generated that is capable of specifically binding, in vivo, a biological target; and

[0048] imaging the mammalian subject using positron emission tomography (PET) at a time point following administration of the tracer dose.

[0049] The term “radiolabeled activatable binding polypeptide” refers herein to a compound comprising a radionuclide and an activatable binding polypeptide. As used herein, the terms “activatable binding polypeptide” and “activatable BP” refer interchangeably to a compound that comprises a binding moiety (BM), linked either directly or indirectly, to a prodomain. The term “binding moiety” and “BM” are used interchangeably herein to refer to a polypeptide that is capable of specifically binding to a biological target. When in a form not modified by the presence of the prodomain, the BM is a polypeptide that specifically binds the biological target. The terms “biological target,” “binding target,” and “target” (when used in the context of binding) refer interchangeably herein to polypeptide that may be present in a mammalian subject. The terms “distribution” and “biodistribution” are used interchangeably herein to refer to the location of activated binding polypeptide in a mammalian subject.

[0050] As used herein, the term “prodomain” refers to a peptide, which comprises a masking moiety (MM) and a cleavable moiety (CM). The prodomain functions to mask the BM until the activatable binding polypeptide is exposed to an activation condition. As used herein, the terms “masking moiety” and “MM”, are used interchangeably herein to refer to a peptide that, when positioned proximal to the BM, interferes with binding of the BM to the biological target. The terms “cleavable moiety” and “CM” are used interchangeably herein to refer to a peptide that is susceptible to cleavage (e.g., an enzymatic substrate, and the like), bond reduction (e.g., reduction of disulfide bond(s), and the like), or other change in physical conformation. The CM is positioned relative to the MM and BM, such that cleavage, or other change in its physical conformation, causes release of the MM from its position proximal to the BM (also referred to herein as “unmasking”). The term “activation condition” refers to the condition that triggers unmasking of the BM, and results in generation of an “activated binding polypeptide” (or “activated BP”). Unmasking of the BM typically results in an activated binding polypeptide having greater binding affinity for the biological target as compared to the corresponding activatable binding polypeptide. Typically, the radiolabeled activatable binding polypeptide specifically binds, in vivo, a biological target. The terms “peptide,” “polypeptide,” and “protein” are used interchangeably herein to refer to a polymer comprising naturally occurring or non-naturally occurring amino acid residues or amino acid analogues.

[0051] Activatable binding polypeptides that are suitable for use in the practice of the present invention may comprise the BM and prodomain components, CM and MM, in a variety of linear or cyclic configurations (via, for example, a cysteine-cysteine disulfide bond), and may further comprise one or more optional linker moieties through which any two or more of the BM, CM, and/or MM moieties may be bound indirectly to each other. Linkers suitable for use in the activatable binding polypeptides employed in the practice of the invention may be any of a variety of lengths. Suitable linkers include those having a length in the range of from about 1 to about 20 amino acids, or from about 1 to about 19 amino acids, or from about 1 to about 18 amino acids, or from about 1 to about 17 amino acids, or from about 1 to about 16 amino acids, or from about 1 to about 15 amino acids, or from about 2 to about 15 amino acids, or from about 3 to about 15 amino acids, or from about 3 to about 14 amino acids, or from about 3 to about 13 amino acids, or from about 3 to about 12 amino acids. In some embodiments, the ABP comprises one or more linkers comprising 1, 2, 3, 4, 5, 6, 7, 8, 9, 10, 11, 12, 13, 14, 15, 16, 17, 18, 19, or 20 amino acids. Typically, the linker is a flexible linker. As used herein, the term “range” is intended to be inclusive of the endpoints which define the limits of the range.

[0052] Exemplary flexible linkers include glycine homopolymers (G)ₙ, (wherein n is an integer that is at least 1; in some embodiments, n is an integer in the range of from about 1 to about 30, or an integer in the range of from about 1 to about 25, or an integer in the range of from about 1 to about 20, or an integer in the range of from about 1 to about 20, or an integer in the range of from about 1 to about 15, or an integer in the range of from about 1 to about 10), glycine-serine polymers, including, for example, (GS)ₙ (wherein n is an integer that is at least 1), (GSGGS)ₙ (SEQ ID NO:68)(wherein n is an integer that is at least 1; in some embodiments, n is an integer in the range of from about 1 to about 30, or an integer in the range of from about 1 to about 25, or an integer in the range of from about 1 to about 20, or an integer in the range of from about 1 to about 20, or an integer in the range of from about 1 to about 15, or an integer in the range of from about 1 to about 10), (GGGS)ₙ (SEQ ID NO:69) (wherein n is an integer that is at least 1; in some embodiments, n is an integer in the range of from about 1 to about 30, or an integer in the range of from about 1 to about 25, or an integer in the range of from about 1 to about 20, or an integer in the range of from about 1 to about 20, or an integer in the range of from about 1 to about 15, or an integer in the range of from about 1 to about 10), GGSG (SEQ ID NO:70), GGSGG (SEQ ID NO:71), GSGSG (SEQ ID NO:72), GSGGG (SEQ ID NO:73), GGGSG (SEQ ID NO:74), GSSSG (SEQ ID NO:75), GSSGGSGGSGGSG (SEQ ID NO:76), GSSGGSGGSGG (SEQ ID NO:77), GSSGGSGGSGGS (SEQ ID NO:78), GSSGGSGGSGGSGGGS (SEQ ID NO:79), GSSGGSGGSG (SEQ ID NO:80), GSSGGSGGSGS (SEQ ID NO:81), GGGS (SEQ ID NO:69), GSSGT (SEQ ID NO:82), GSSG (SEQ ID NO:83), GGGSSGGSGGSGG (SEQ ID NO:173), GGS, and the like, and additionally, a glycine-alanine polymer, an alanine-serine polymer, and other flexible linkers known in the art.

[0053] Illustrative activatable binding polypeptide configurations include, for example, in either N- to C-terminal direction or C- to N-terminal direction:
[0054] (MM)-(CM)-(BM)
[0055] (BM)-(CM)-(MM)
[0056] (MM)-L₁-(CM)-(AB)
[0057] (MM)-L₁-(CM)-L₂-(AB)
[0058] cyclo[L₁-(MM)-L₂-(CM)-L₃-(AB)]
   wherein each of L₁, L₂, and L₃ is a linker peptide that may be identical or different.

[0059] An activatable binding polypeptide can also include a spacer located, for example, at the amino terminus of the prodomain. In some embodiments, the spacer is joined directly to the MM of the activatable binding polypeptide. In some embodiments, the spacer is joined directly to the MM of the activatable binding polypeptide in the structural arrangement from N-terminus to C-terminus of spacer-MM-CM-BM. An example of a spacer joined directly to the N-terminus of MM of the activatable antibody is selected from the group consisting of QGQSGS (SEQ ID NO: 157); GQSGS (SEQ ID NO: 158); QSGS (SEQ ID NO: 159); SGS; GS; S; QGQSGQG (SEQ ID NO: 160); GQSGQG (SEQ ID NO: 161); QSGQG (SEQ ID NO: 162); SGQG (SEQ ID NO: 163); GQG; QG; G; QGQSGQ (SEQ ID NO: 164); GQSGQ (SEQ ID NO: 165); QSGQ (SEQ ID NO: 166); SGQ; GQ; and Q.

[0060] In some embodiments, the spacer includes at least the amino acid sequence QGQSGS (SEQ ID NO: 157). In some embodiments, the spacer includes at least the amino acid sequence GQSGS (SEQ ID NO: 158). In some embodiments, the spacer includes at least the amino acid sequence QSGS (SEQ ID NO: 159). In some embodiments, the spacer includes at least the amino acid sequence SGS. In some embodiments, the spacer includes at least the amino acid sequence GS. In some embodiments, the spacer includes at least the amino acid sequence S. In some embodiments, the spacer includes at least the amino acid sequence QGQSGQG (SEQ ID NO: 160). In some embodiments, the spacer includes at least the amino acid sequence GQSGQG (SEQ ID NO: 161). In some embodiments, the spacer includes at least the amino acid sequence QSGQG (SEQ ID NO: 162). In some embodiments, the spacer includes at least the amino acid sequence SGQG (SEQ ID NO: 163). In some embodiments, the spacer includes at least the amino acid sequence GQG. In some embodiments, the spacer includes at least the amino acid sequence QG. In some embodiments, the spacer includes at least the amino acid sequence G. In some embodiments, the spacer includes at least the amino acid sequence QGQSGQ (SEQ ID NO: 164). In some embodiments, the spacer includes at least the amino acid sequence GQSGQ (SEQ ID NO: 165). In some embodiments, the spacer includes at least the amino acid sequence QSGQ (SEQ ID NO: 166). In some embodiments, the spacer includes at least the amino acid sequence SGQ. In some embodiments, the spacer includes at least the amino acid sequence GQ. In some embodiments, the spacer includes at least the amino acid sequence Q. In some embodiments, the activatable antibody does not include a spacer sequence.

[0061] Activatable binding polypeptides that are suitable for use in the radiolabeled binding polypeptide employed herein include any of the activatable binding polypeptides, modified antibodies, and activatable antibodies described in WO 2009/025846, WO 2010/096838, WO 2010/081173, WO 2013/163631, WO 2013/192546, WO 2013/192550, WO 2014/026136, WO 2014/052462, WO 2014/107599, WO 2014/197612, WO 2015/013671, WO 2015/048329, WO 2015/066279, WO 2015/116933, WO 2016/014974, WO 2016/118629, WO 2016/149201, WO 2016/179285, WO 2016/179257, WO 2016/179335, WO 2017/011580, PCT/US2017/059740, U.S. Provisional Application Ser. Nos. 62/469,429, 62/572,467, and 62/613,358, each of which is incorporated herein by reference in its entirety.

[0062] Typically, the prodomain is linked, either directly or indirectly, to the BM via the CM of the prodomain. The CM may be designed to be cleaved by upregulated proteolytic activity (i.e., the activation condition) in tissue, such as those present in many cancers. Thus, activatable binding polypeptides may be designed so they are predominantly activated at a target treatment site where proteolytic activity and the desired biological target are co-localized.

[0063] Cleavable moieties suitable for use in radiolabeled activatable binding polypeptides of the present invention include those that are a substrate for a protease. Usually, the protease is an extracellular protease. Suitable substrates may be readily identified using any of a variety of known techniques, including those described in U.S. Pat. Nos. 7,666,817, 8,563,269, PCT Publication No. WO 2014/026136, Boulware, et al., “Evolutionary optimization of peptide substrates for proteases that exhibit rapid hydrolysis kinetics,” Biotechnol. Bioeng. (2010) 106.3: 339-46, each of which is hereby incorporated by reference in its entirety. Exemplary substrates that are suitable for use as a cleavable moiety include, for example, those that are substrates cleavable by any one or more of the following proteases: an ADAM, an ADAM-like, or ADAMTS (such as, for example, ADAM8, ADAM9, ADAM10, ADAM12, ADAM15, ADAM17/TACE, ADAMDEC1, ADAMTS1, ADAMTS4, ADAMTS5); an aspartate protease (such as, for example, BACE, Renin, and the like); an aspartic cathepsin (such as, for example, Cathepsin D, Cathepsin E, and the like); a caspase (such as, for example, Caspase 1, Caspase 2, Caspase 3, Caspase 4, Caspase 5, Caspase 6, Caspase 7, Caspase 7, Caspase 8, Caspase 9, Caspase 10, Caspase 14, and the like); a cysteine proteinase (such as, for example, Cruzipain, Legumain, Otubain-2, and the like); a kallikrein-related peptidase (KLK) (such as, for example, KLK4, KLK5, KLK6, KLK7, KLK8, KLK10, KLK11, KLK13, KLK14, and the like); a metallo proteinase (such as, for example, Meprin, Neprilysin, prostate-specific membrane antigen (PSMA), bone morphogenetic protein 1 (BMP-1), and the like); a matrix metalloproteinase (MMP) (such as, for example, MMP1, MMP2, MMP3, MMP7, MMP8, MMP9, MMP10, MMP11, MMP12, MMP13, MMP14, MMP15, MMP16, MMP17, MMP19, MMP20, MMP23, MMP24, MMP26, MMP27, and the like); a serine protease (such as, for example, activated protein C, Cathepsin A, Cathepsin G, Chymase, a coagulation factor protease (such as, for example, FVIIa, FIXa, FXa, FXIa, FXIIa, and the like)); elastase, Granzyme B, Guanidinobenzoatase, HtrA1, Human Neutrophil Elastase, Lactoferrin, Marapsin, NS3/4A, PACE4, Plasmin, prostate-specific antigen (PSA), tissue plasminogen activator (tPA), Thrombin, Tryptase, urokinase (uPA), a Type II transmembrane Serine Protease (TTSP) (such as, for example, DESC1, DPP-4, FAP, Hepsin, Matriptase-2, MT-SP/Matriptase, TMPRSS2, TMPRSS3, TMPRSS4, and the like), and the like. Exemplary CMs that are suitable for use in the radiolabeled activatable binding polypeptides of the present invention include those described in, for example, WO 2010/081173, WO 2015/048329, WO 2015/116933, and WO 2016/118629, each of which is incorporated herein by reference in its entirety. Illustrative CMs are provided herein as SEQ ID NOs: 1-67. Thus, in some embodiments, the radiolabeled activatable binding polypeptide comprises (i.e., has a prodomain comprising) a CM that comprises an amino acid sequence selected from the group consisting of SEQ ID NOs:1-67. In some embodiments, the CM comprises an amino acid sequence corresponding to SEQ ID NO:24.

[0064] The MM is selected such that it reduces the ability of the BM to specifically bind the biological target. As such, the dissociation constant (Kd) of the activatable binding polypeptide toward the biological target is usually greater than the Kd of the corresponding activated binding polypeptide to the biological target. The MM can inhibit the binding of the activatable binding polypeptide to the biological target in a variety of ways. For example, the MM can bind to the BM thereby inhibiting binding of the activatable binding polypeptide to the biological target. The MM can allosterically or sterically inhibit binding of the activatable binding polypeptide to biological target. In some embodiments, the MM binds specifically to the BM. Suitable MMs may be identified using any of a variety of known techniques. For example, peptide MMs may be identified using the methods described in U.S. Patent Application Publication Nos. 2009/0062142 and 2012/0244154, and PCT Publication No. WO 2014/026136, each of which is hereby incorporated by reference in their entirety.

[0065] In some embodiments, the MM is selected such that binding of the activatable binding polypeptide to the biological target is reduced, relative to binding of the corresponding BM (i.e., without the prodomain) to the same target, by at least about 50%, or at least about 60%, or at least about 65%, or at least about 70%, or at least about 75%, or at least about 80%, or at least about 85%, or at least about 90%, or at least about 91%, or at least about 92%, or at least about 93%, or at least about 94%, or at least about 95%, or at least about 96%, or at least about 97%, or at least about 98%, or at least about 99%, and even 100%, for at least about 2 hours, or at least about 4 hours, or at least about 6 hours, or at least about 8 hours, or at least about 12 hours, or at least about 24 hours, or at least about 28 hours, or at least about 30 hours, or at least about 36 hours, or at least about 48 hours, or at least about 60 hours, or at least about 72 hours, or at least about 84 hours, or at least about 96 hours, or at least about 5 days, or at least about 10 days, or at least about 15 days, or at least about 30 days, or at least about 45 days, or at least about 60 days, or at least about 90 days, or at least about 120 days, or at least about 150 days, or at least about 180 days, or at least about 1 month, or at least about 2 months, or at least about 3 months, or at least about 4 months, or at least about 5 months, or at least about 6 months, or at least about 7 months, or at least about 8 months, or at least about 9 months, or at least about 10 months, or at least about 11 months, or at least about 12 months or more.

[0066] Typically, the MM is selected such that the Kd of the activatable binding polypeptide towards the biological target is at least about 2, about 3, about 4, about 5, about 10, about 25, about 50, about 100, about 250, about 500, about 1,000, about 2,500, about 5,000, about 10,000, about 100,000, about 500,000, about 1,000,000, about 5,000,000, about 10,000,000, about 50,000,000, or greater, or in the range of from about 5 to about 10, or from about 10 to about 100, or from about 10 to about 1,000, or from about 10 to about 10,000 or from about 10 to about 100,000, or from about 10 to about 1,000,000, or from about 10 to about 10 to about 10,000,000, or from about 100 to about 1,000, or from about 100 to about 10,000, or from about 100 to about 100,000, or from about 100 to about 1,000,000, or from about 100 to about 10,000,000, or from about 1,000 to about 10,000, or from about 1,000 to about 100,000, or from about 1,000 to about 1,000,000, or from about 1,000 to about 10,000,000, or from about 10,000 to about 100,000, or from about 10,000 to about 1,000,000, or from about 10,000 to about 10,000,000 or from about 100,000 to about 1,000,00, or 100,000 to about 10,000,000 times greater than the Kd of the BM (i.e., not modified with a prodomain).

[0067] Conversely, the MM is selected such that the Kd of the BM (i.e., not modified with a prodomain) towards the biological target is at least about 2, about 3, about 4, about 5, about 10, about 25, about 50, about 100, about 250, about 500, about 1,000, about 2,500, about 5,000, about 10,000, about 100,000, about 500,000, about 1,000,000, about 5,000,000, about 10,000,000, about 50,000,000, or more times lower than the binding affinity of the corresponding activatable binding polypeptide; or in the range of from about 5 to about 10, or from about 10 to about 100, or from about 10 to about 1,000, or from about 10 to about 10,000 or from about 10 to about 100,000, or from about 10 to about 1,000,000, or from about 10 to about 10 to about 10,000,000, or from about 100 to about 1,000, or from about 100 to about 10,000, or from about 100 to about 100,000, or from about 100 to about 1,000,000, or from about 100 to about 10,000,000, or from about 1,000 to about 10,000, or from about 1,000 to about 100,000, or from about 1,000 to about 1,000,000, or from about 1,000 to about 10,000,000, or from about 10,000 to about 100,000, or from about 10,000 to about 1,000,000, or from about 10,000 to about 10,000,000 or from about 100,000 to about 1,000,00, or 100,000 to about 10,000,000 times lower than the binding affinity of the corresponding activatable binding polypeptide.

[0068] In some embodiments, the Kd of the MM towards the BM is greater than the Kd of the BM towards the biological target. In these embodiments, the Kd of the MM towards the BM may be at least about 5, at least about 10, at least about 25, at least about 50, at least about 100, at least about 250, at least about 500, at least about 1,000, at least about 2,500, at least about 5,000, at least about 10,000, at least about 100,000, at least about 1,000,000, or even 10,000,000 times greater than the Kd of the BM towards the biological target.

[0069] Illustrative MMs include those provided as SEQ ID NOS:84-108 (for use in an anti-PDL-1 activatable antibody), as well as those disclosed in WO 2009/025846, WO 2010/096838, WO 2010/081173, WO 2013/163631, WO 2013/192546, WO 2013/192550, WO 2014/026136, WO 2014/052462, WO 2014/107599, WO 2014/197612, WO 2015/013671, WO 2015/048329, WO 2015/066279, WO 2015/116933, WO 2016/014974, WO 2016/118629, WO 2016/149201, WO 2016/179285, WO 2016/179257, WO 2016/179335, WO 2017/011580, PCT/US2017/059740, U.S. Provisional Application Ser. Nos. 62/469,429, 62/572,467, and 62/613,358, each of which is incorporated herein by reference in its entirety. In some embodiments, the radiolabeled activatable binding polypeptide comprises an anti-PDL-1 activatable antibody, where radiolabeled activatable binding polypeptide has an MM comprising an amino acid sequence selected from the group consisting of any of SEQ ID NOs:84-108. In certain of these embodiments, the MM comprises an amino acid sequence corresponding to SEQ ID NO: 90.

[0070] In some embodiments, the prodomain has an amino acid sequence that is a substantially lysine-depleted amino acid sequence. In certain embodiments, the prodomain has an amino acid sequence that is a substantially arginine-depleted amino acid sequence. In some of these embodiments, the prodomain has an amino acid sequence that is a substantially lysine- and arginine-depleted amino acid sequence.

[0071] As used herein, the term “substantially ‘X’-depleted” in connection with reference to the prodomain amino acid sequence, where “X” is an amino acid residue type, means that the amino acid sequence of the prodomain, inclusive of any linker(s) present that are proximal to any prodomain elements (i.e., masking moiety and cleavable moiety) comprises 10% or less of the specified amino acid residue type (i.e., “X”), on the basis of total number of amino acid residues in the prodomain, and if present, inclusive of any linker(s) present that are proximal to the prodomain elements (i.e., mask moiety and cleavable moiety). The amino acid sequence of the prodomain, and if present, any linker(s) present that are proximal to the prodomain elements, may be identified by first identifying the amino acid sequence of the binding moiety. The amino acid sequence that remains is considered the prodomain for the purpose of determining the basis on which to compute percentage of an amino acid type present in the prodomain. In some embodiments, when the activatable binding polypeptide is an activatable antibody, the prodomain, inclusive of any linker(s) present that are proximal to the prodomain elements, is located adjacent to (e.g., to the N-terminal side of) framework region 1 of a variable region of the antibody component. In some embodiments, the activatable binding polypeptide comprises

[0072] In some embodiments, the prodomain amino acid sequence is a substantially lysine-depleted prodomain amino acid sequence comprising lysine in a quantity that does not exceed 10% on the basis of total number of amino acid residue species in the prodomain amino acid sequence, as defined above. In certain embodiments, the prodomain amino acid sequence comprises lysine in a quantity that does not exceed 9%, or does not exceed 8%, or does not exceed 7%, or does not exceed 6%, or does not exceed 5%, or does not exceed 4%, or does not exceed 3%, or does not exceed 3%, or does not exceed 3%, or does not exceed 2%, or does not exceed 1% of the number of amino acid residues in the prodomain amino acid sequence, as defined above. In certain embodiments, prodomain amino acid sequence comprises from 0 to 5 lysine residues, or from 0 to 4 lysine residues, or from 0-3 lysine residues, or from 0-2 lysine residues, or from 0-1 lysine residues. In certain specific embodiments, the prodomain amino acid sequence comprises an amino acid sequence having no lysine residues present.

[0073] In some embodiments, the prodomain amino acid sequence is a substantially arginine-depleted prodomain amino acid sequence comprising arginine in a quantity that does not exceed 10% on the basis of total number of amino acid residue species in the prodomain amino acid sequence, as defined above. In certain embodiments, the prodomain amino acid sequence comprises arginine in a quantity that does not exceed 9%, or does not exceed 8%, or does not exceed 7%, or does not exceed 6%, or does not exceed 5%, or does not exceed 4%, or does not exceed 3%, or does not exceed 3%, or does not exceed 3%, or does not exceed 2%, or does not exceed 1% of the number of amino acid residues in the prodomain amino acid sequence, as defined above. In certain embodiments, the prodomain comprises an arginine-depleted amino acid sequence having no arginine residue present. In certain embodiments, the prodomain amino acid sequence comprises from 0 to 5 arginine residues, or from 0 to 4 arginine residues, or from 0-3 arginine residues, or from 0-2 arginine residues, or from 0-1 arginine residues. In certain specific embodiments, the prodomain amino acid sequence comprises an amino acid sequence having no arginine residues present.

[0074] In certain embodiments, the prodomain amino acid sequence is a lysine- and an arginine-depleted prodomain amino acid sequence comprising an amino acid

[0075] The binding moiety may be any of a variety of polypeptides that is capable of specifically binding a desired biological target. Illustrative classes of biological targets include cell surface receptors and secreted binding proteins (e.g., growth factors, and the like), soluble enzymes, structural proteins (e.g., collagen, fibronectin, and the like), and the like. Suitable biological targets include, for example, 1-92-LFA-3, α4-integrin, α-V-integrin, α4β1-integrin, AGR2, Anti-Lewis-Y, Apelin J receptor, APRIL, B7-H4, BAFF, BTLA, C5 complement, C-242, CA9, CA19-9 (Lewis a), carbonic anhydrase 9, CD2, CD3, CD6, CD9, CD11a, CD19, CD20, CD22, CD25, CD28, CD30, CD33, CD40, CD40L, CD41, CD44, CD44v6, CD47, CD51, CD52, CD56, CD64, CD70, CD71, CD74, CD80, CD81, CD86, CD95, CD117, CD125, CD132 (IL-2RG), CD133, CD137, CD137, CD138, CD166, CD172A, CD248, CDH6, CEACAM5 (CEA), CEACAM6 (NCA-90), CLAUDIN-3, CLAUDIN-4, cMet, Collagen, Cripto, CSFR, CSFR-1, CTLA-4, CTGF, CXCL10, CXCL13, CXCR1, CXCR2, CXCR4, CYR61, DL44, DLK, DLL4, DPP-4, DSG1, EGFR, EGFRviii, Endothelin B receptor (ETBR), ENPP3, EpCAM, EPHA2, ERBB3, F protein of RSV, FAP, FGF-2, FGF-8, FGFR1, FGFR2, FGFR3, FGFR4, Folate receptor, GAL3ST1, G-CSF, G-CSFR, GD2, GITR, GLUT1, GLUT4, GM-CSF, GM-CSFR, GP IIb/IIIa receptors, GP130, GPIIB/IIIA, GPNMB, GRP78, Her2/neu, HVEM, Hyaluronidase, ICOS, IFNα, IFNβHGF, hGH, hyaluronidase, ICOS, IFNα, IFNβ, IFNγ, IgE, IgE receptor (FceRI), IGF, IGF1R, IL1B, IL1R, IL2, IL11, IL12p40, IL-12R, IL-12Rβ1, IL13, IL13R, IL15, IL17, IL18, IL21, IL23, IL23R, IL27/IL27R (wsx1), IL29, IL-31R, IL31/IL31R, IL-2R, IL4, IL4-R, IL6, IL-6R, Insulin Receptor, Jagged Ligands, Jagged 1, Jagged 2, LAG-3, LIF-R, Lewis X, LIGHT, LRP4, LRRC26, MCSP, Mesothelin, MRP4, MUC1, Mucin-16 (MUC16, CA-125), Na/K ATPase, Neutrophil elastase, NGF, Nicastrin, Notch Receptors, Notch 1, Notch 2, Notch 3, Notch 4, NOV, OSM-R, OX-40, PAR2, PDGF-AA, PDGF-BB, PDGFRα, PDGFRβ, PD-1, PD-L1, PD-L2, Phosphatidylserine, P1GF, PSCA, PSMA, RAAG12, RAGE, SLC44A4, Sphingosine 1 Phosphate, STEAP1, STEAP2, TAG-72, TAPA1, TGFβ, TIGIT, TIM-3, TLR2, TLR6, TLR7, TLR8, TLR9, TMEM31, TNFα, TNFR, TNFRS12A, TRAIL-R1, TRAIL-R2, Transferrin, Transferrin receptor, TRK-A, TRK-B, uPAR, VAP1, VCAM-1, VEGF, VEGF-A, VEGF-B, VEGF-C, VEGF-D, VEGFR1, VEGFR2, VEGFR3, VISTA, WISP-1, WISP-2, WISP-3, and the like. In a specific embodiment, the binding target is PDL-1.

[0076] In some embodiments, the binding moiety comprises a non-antibody polypeptide, such as, for example, the soluble domain of a cell surface receptor, a secreted binding polypeptide, a soluble enzyme, a structural protein, and portions and variants thereof. As used herein, the term “non-antibody polypeptide” refers to a polypeptide that does not comprise the antigen binding domain of an antibody. Illustrative non-antibody polypeptides that are suitable for use as binding moieties in the radiolabeled activatable binding polypeptides employed herein include any of the biological targets listed above, as well as portions (e.g., soluble domains) and variants thereof.

[0077] In one embodiment, the activatable binding polypeptide is an activatable antibody. As used herein, the term “activatable antibody” refers to an activatable binding polypeptide in which the binding moiety comprises a full-length antibody or portion thereof. Typically, in these embodiments, the binding moiety comprises at least a portion of the antigen binding domain. The term “antigen binding domain” refers herein to the part of an immunoglobulin molecule that participates in antigen binding. The antigen binding site is formed by amino acid residues of the N-terminal variable (“V) regions of the heavy (“H”) and light (“L”) chains. Three highly divergent stretches within the V regions of the heavy and light chains, referred to as “hypervariable regions,” are interposed between more conserved flanking stretches known as “framework regions,” or “FRs”. Thus, the term “FR” refers to amino acid sequences which are naturally found between, and adjacent to, hypervariable regions in immunoglobulins. In an antibody molecule, the three hypervariable regions of a light chain and the three hypervariable regions of a heavy chain are disposed relative to each other in three-dimensional space to form an antigen-binding surface. The antigen-binding surface is complementary to the three-dimensional surface of an antigen, and the three hypervariable regions of each of the heavy and light chains are referred to as “complementarity-determining regions,” or “CDRs.” The assignment of amino acids to each domain is in accordance with the definitions of Kabat Sequences of Proteins of Immunological Interest (National Institutes of Health, Bethesda, Md. (1987 and 1991)); Chothia & Lesk, J. Mol. Biol. 196:901-917 (1987); Chothia, et al. Nature 342:878-883 (1989)).

[0078] Activatable antibodies may comprise, for example, one or more variable or hypervariable region of a light and/or heavy chain (VL and/or VH, respectively), variable fragment (Fv, Fab′ fragment, F(ab′)2 fragments, Fab fragment, single chain antibody (scab), single chain variable region (scFv), complementarity determining region (CDR), domain antibody (dAB), single domain heavy chain immunoglobulin of the BHH or BNAR type, single domain light chain immunoglobulins, or other polypeptide known to bind a biological target. In some embodiments, an activatable antibody comprises an immunoglobulin comprising two Fab regions and an Fc region. In some embodiments, an activatable antibody is multivalent, e.g., bivalent, trivalent, and so on. In some embodiments, the activatable antibody comprises a prodomain joined to the N-terminus of the VL domain of the antibody (or portion thereof) component of the activatable antibody (e.g., from N-terminus to C-terminus, MM-CM-VL, where each “-” refers to a direct or indirect linkage). In some embodiments, the activatable antibody comprises a prodomain joined to the N-terminus of the VH domain of the antibody (or portion thereof) component of the activatable antibody (e.g., from N-terminus to C-terminus, MM-CM-VH, where each “-” refers to a direct or indirect linkage).

[0079] Antibodies and portions thereof (including, for example, individual CDRs, as well as light and heavy chains) that are suitable for use in the radiolabeled activatable binding polypeptides employed herein, include, for example, any of those described in WO 2009/025846, WO 2010/096838, WO 2010/081173, WO 2013/163631, WO 2013/192546, WO 2013/192550, WO 2014/026136, WO 2014/052462, WO 2014/107599, WO 2014/197612, WO 2015/013671, WO 2015/048329, WO 2015/066279, WO 2015/116933, WO 2016/014974, WO 2016/118629, WO 2016/149201, WO 2016/179285, WO 2016/179257, WO 2016/179335, WO 2017/011580, PCT/US2017/059740/WO 2018/085555, WO 2018/165619, PCT/US2018/055733, PCT/US2018/055717, U.S. Provisional Application Ser. Nos. 62/469,429, 62/572,467, 62/613,358, each of which is incorporated herein by reference in its entirety. Illustrative specific sources of antibodies or portions thereof that may be employed in the practice of the present invention include, for example, bevacizumab (VEGF), ranibizumab (VEGF), cetuximab (EGFR), panitumumab (EGFR), infliximab (TNFα), adalimumab (TNFα), natalizumab (Integrin α4), basiliximab (IL2R), eculizumab (Complement C5), efalizumab (CD11a), tositumomab (CD20), ibritumomab tiuxetan (CD20), rituximab (CD20), ocrelizumab (CD20), ofatumamab (CD20), obinutuzumab (CD20), daclizumab (CD25), brentuximab vedotin (CD30), gemtuzumab (CD33), gemtuzumab ozogamicin (CD33), alemtuzumab (CD52), abiciximab (Glycoprotein receptor lib/IIIa), omalizumab (IgE), trastuzumab (Her2), trastuzumab emtansine (Her2), palivizumab (F protein of RSV), ipilimumab (CTLA-4), tremelimumab (CTLA-4), Hu5c8 (CD40L), pertuzumab (Her2-neu), ertumaxomab (CD3/Her2-neu), abatacept (CTLA-4), tanezumab (NGF), bavituximab (Phosphatidylserine), zalutumumab (EGFR), mapatumamab (EGFR), matuzumab (EGFR), nimotuzumab (EGFR), ICR62 (EGFR), mAB 528 (EGFR), CH806 (EGFR), MDX-447 (EGFR/CD64), edrecolomab (EpCAM), RAV12 (RAAG12), huJ591 (PSMA), etanercept (TNF-R), alefacept (1-92-LFA-3), ankinra IL-1Ra), GC1008 (TGFβ), adecatumumab (EpCAM), figitumamab (IGF1R), tocilizumab (IL-6 receptor), ustekinumab (IL-12/IL-23), denosumab (RANKL), nivolumab (PD1), pembrolizumab (PD1), pidilizumab (PD1), MEDI0680 (PD1), PDR001 (PD1), REGN2810 (PD1), BGB-A317 (PD1), BI-754091 (PD1), JNJ-63723283 (PD1), MGA012 (PD1), TSR042 (PD1), AGEN2034 (PD1), INCSHR-1210 (PD1), JS001 (PD1), durvalumab (PD-L1), atezolizumab (PD-L1), avelumab (PD-L1), FAZ053 (PD-L1), LY-3300054 (PD-L1), KN035 (PD-L1), and the like (with biological target indicated in parentheses).

[0080] In one embodiment, the BM comprises an anti-PDL1 antibody (i.e., full length antibody or portion thereof). Illustrative anti-PDL1 antibodies (i.e., full length antibodies or portions thereof), include, for example, those having all or a portion of a VL region of an anti-PDL-1 antibody (including, for example, those encoded by SEQ ID NO: 110 and SEQ ID NO:112 (encoded by polynucleotide sequences corresponding to SEQ ID NO:109 and SEQ ID NO:111, respectively)) and/or all or a portion of a VH region of an anti-PDL-1 antibody (including, for example, any of the VH domains encoded by SEQ ID NOs:114, 116, 118, 120, 122, 124, 126, 128, 130, 132, 134, 136, 138, 140, 142, 144, 146, 148, 150, 152, 154, and 156 (encoded by polynucleotide sequences corresponding to SEQ ID NOs:113, 115, 117, 119, 121, 123, 125, 127, 129, 131, 133, 135, 137, 139, 141, 143, 145, 147, 149, 151, 153, and 155, respectively). Illustrative activatable anti-PDL-1 antibodies include an activatable anti-PDL-1 antibody comprising a light chain having an amino acid sequence corresponding to SEQ ID NO:168 or SEQ ID NO:170, encoded by the polynucleotide sequence of SEQ ID NOs:167 and 169, respectively, and a heavy chain corresponding to SEQ ID NO:172 (encoded by the polynucleotide sequence of SEQ ID NO:171).

[0081] In some embodiments, the radiolabeled activatable binding polypeptide comprises an activatable anti-PDL-1 antibody having a variable heavy (VH) chain comprising an amino acid sequence selected from the group consisting of SEQ ID NOs:176, 177, 178, 179, 180, 181, 182, 183, 184, 185, and 186; and a variable light (VL) chain comprising an amino acid sequence selected from the group consisting of SEQ ID NOs:187, 188, 189, 190, 191, 192, 193, and 194. In other embodiments, the radiolabeled activatable anti-PDL-1 antibody has a VH chain comprising an amino acid sequence corresponding to SEQ ID NO:195 and a VL chain comprising an amino acid sequence corresponding to SEQ ID NO:196. In further embodiments, the radiolabeled activatable anti-PDL-1 antibody has a VH chain comprising an amino acid sequence selected from the group consisting of SEQ ID NOs: 197 and 198; and a VL chain comprising an amino acid sequence selected from the group consisting of SEQ ID NOs:199, 200, 201, 202, 203, 204, 205, 206, 207, 208, 209.210, 211, 212, 213, and 214. In still further embodiments, the radiolabeled activatable anti-PDL-1 antibody has a VH chain comprising an amino acid sequence selected from the group consisting of SEQ ID Nos:215, 177, 216, 179, 217, 181, 182, 183, 184, and 185; and a VL chain comprising an amino acid sequence selected from the group consisting of SEQ ID NOs:218, 187, 188, 189, 190, 191, 192, and 193 [[Group D]]. In other embodiments, the radiolabeled activatable anti-PDL-1 antibody has a VH chain comprising an amino acid sequence corresponding to SEQ ID NO:219 and a VL chain comprising an amino acid sequence corresponding to SEQ ID NO:220. In certain embodiments, the radiolabeled activatable anti-PDL-1 antibody has a VH chain comprising an amino acid sequence selected from the group consisting of SEQ ID NOs:221, 222, 223, 224, 225, 226, 227, 228, 229, 230, and 231; and a VL chain comprising an amino acid sequence selected from the group consisting of SEQ ID NOs:232, 233, 234, 235, 236, 237, 238, 239, 240, and 241. Instill further embodiments, the radiolabeled activatable anti-PDL-1 antibody has a VH chain comprising an amino acid sequence selected from the group consisting of SEQ ID NOs:242, 243, 244, 245, 246, 247, 248, 249, 250, 251, 252, 253, 254, and 255; and a VL chain comprising an amino acid sequence selected from the group consisting of SEQ ID NOs:256, 257, 258, 259, 260, 261, 262, 263, 264, 265, 266, 267, 268, and 269. In some embodiments, the radiolabeled activatable anti-PDL-1 antibody has a VH chain comprising an amino acid sequence selected from the group consisting of SEQ ID NOs:270, 271, 272, 273, and 274; and a VL chain comprising an amino acid sequence selected from the group consisting of SEQ ID NOs:275, 276, 277, and 278. In certain embodiments, the radiolabeled activatable anti-PDL-1 antibody has a VH chain comprising an amino acid sequence selected from the group consisting of SEQ ID NOs:279, 280, 281, 282, 283, 284, 285, 286, 287, 288, 289, 290, 291, 293, 294, 295, 296, 297, and 298; and a VL chain comprising an amino acid sequence selected from the group consisting of SEQ ID NOs:299, 300, 301, 302, 303, 304, 305, 306, 307, 308, 309, 310, 311, 312, 313, 314, 315, 316, 317, 318, 319, 320, 321, 322, 323, 324, 325, 326, and 327. In other embodiments, the radiolabeled activatable anti-PDL-1 antibody has a heavy chain comprising an amino acid sequence selected from the group consisting of SEQ ID NOs:328 and 329; and a light chain comprising an amino acid sequence selected from the group consisting of SEQ ID NOs:330 and 331. In further embodiments, the radiolabeled activatable anti-PDL-1 antibody has a VH chain comprising an amino acid sequence selected from the group consisting of SEQ ID NOs:332 and 333; and a VL chain comprising an amino acid sequence corresponding to SEQ ID NO:199. In some of these embodiments, the radiolabeled activatable anti-PDL-1 antibody comprises a heavy chain amino acid sequence comprising the amino acid sequence of SEQ ID NO:334, and/or a light chain amino acid sequence corresponding to SEQ ID NO:335. In other embodiments, the radiolableled activatable anti-PDL-1 antibody has a VH chain comprising an amino acid sequence selected from the group consisting of SEQ ID NOs:336, 337, 338, 339, 340, 341, 342, 343, 344, 345, 346, 347, 348, 349, 350, 351, 352, 353, 354, 355, 356, 357, 358, 359, 360, and 361; and a VL chain comprising an amino acid sequence selected from the group consisting of SEQ ID NOs:362, 363, 364, 365, 366, 367, 368, 369 370, 371, 372, 373, 374, 375, 376, and 377. In still other embodiments, the radiolabeled activatable anti-PDL-1 antibody has a VH chain comprising an amino acid sequence corresponding to SEQ ID NO:378 and a VL chain comprising an amino acid sequence corresponding to SEQ ID NO:379. In further embodiments, the radiolabeled activatable anti-PDL-1 antibody has a VH chain comprising an amino acid sequence selected from the group consisting of SEQ ID NOs:380, 381, 382, 383, 384, 385, 386, 387, 388, 389, 390, 391, 392, 393, 394, and 395; and a VL chain comprising an amino acid sequence selected from the group consisting of SEQ ID NOs:396, 397, 398, 399, 400, 401, 402, 403, 404, 405, 406, 407, 408, 409, 410, and 411. In certain embodiments, the radiolabeled activatable anti-PDL-1 antibody has a VH chain comprising an amino acid sequence corresponding to SEQ ID NO:412 and a VL chain comprising an amino acid sequence corresponding to SEQ ID NO:413.

[0082] In still further embodiments, the radiolabeled activatable anti-PDL-1 antibody comprises a VL chain having a CDR1 amino acid sequence comprising SEQ ID NO:414, a CDR2 amino acid sequence comprising SEQ ID NO:415, and a CDR3 amino acid sequence comprising SEQ ID NO:416; and a VH chain having a CDR1 amino acid sequence comprising SEQ ID NO:425, a CDR2 amino acid sequence comprising SEQ ID NO:426, and a CDR3 amino acid sequence comprising SEQ ID NO:427. In another embodiment, the radiolabeled activatable anti-PDL-1 antibody comprises a VL chain having a CDR1 amino acid sequence comprising SEQ ID NO:414, a CDR2 amino acid sequence comprising SEQ ID NO:417, and a CDR3 amino acid sequence comprising SEQ ID NO:418; and a VH chain having a CDR1 amino acid sequence comprising SEQ ID NO:425, a CDR2 amino acid sequence comprising SEQ ID NO:428, and a CDR3 amino acid sequence comprising SEQ ID NO:429. In a further embodiment, the radiolabeled activatable anti-PDL-1 antibody comprises a VL chain having a CDR1 amino acid sequence comprising SEQ ID NO:414, a CDR2 amino acid sequence comprising SEQ ID NO:419, and a CDR3 amino acid sequence comprising SEQ ID NO:420; and a VH chain having a CDR1 amino acid sequence comprising SEQ ID NO:425, a CDR2 amino acid sequence comprising SEQ ID NO:430, and a CDR3 amino acid sequence comprising SEQ ID NO:431. In yet another embodiment, the radiolabeled activatable anti-PDL-1 antibody comprises a VL chain having a CDR1 amino acid sequence comprising SEQ ID NO:414, a CDR2 amino acid sequence comprising SEQ ID NO:421, and a CDR3 amino acid sequence comprising SEQ ID NO:422; and a VH chain having a CDR1 amino acid sequence comprising SEQ ID NO:425, a CDR2 amino acid sequence comprising SEQ ID NO:432, and a CDR3 amino acid sequence comprising SEQ ID NO:433.

[0083] In a further embodiment, the radiolabeled activatable anti-PDL-1 antibody comprises a VL chain having a CDR1 amino acid sequence comprising SEQ ID NO:414, a CDR2 amino acid sequence comprising SEQ ID NO:423, and a CDR3 amino acid sequence comprising SEQ ID NO:424; and a VH chain having a CDR1 amino acid sequence comprising SEQ ID NO:425, a CDR2 amino acid sequence selected from the group consisting of SEQ ID NOs:434, 436, 443, 444, 445, 446, 447, 448, 449, 450, 451, and 452, and a CDR3 amino acid sequence selected from the group consisting of SEQ ID NOs:435, 437, 438, 439, 440, 441, and 442. In a still further embodiment, the radiolabeled activatable anti-PDL-1 antibody comprises a VL chain having a CDR1 amino acid sequence comprising SEQ ID NO:414, a CDR2 amino acid sequence comprising SEQ ID NO:417, and a CDR3 amino acid sequence comprising SEQ ID NO:424; and a VH chain having a CDR1 amino acid sequence comprising SEQ ID NO:425, a CDR2 amino acid sequence comprising SEQ ID NO:451, and a CDR3 amino acid sequence comprising SEQ ID NO:440.

[0084] In an additional embodiment, the radiolabeled activatable anti-PDL-1 antibody comprises a VL chain comprising a CDR1 amino acid sequence selected from the group consisting of SEQ ID NOs:491, 492, 493, 494, and 495, a CDR2 amino acid sequence selected from the group consisting of SEQ ID NOs:479, 417, 480, 481, 482, and a CDR3 amino acid sequence selected from the group consisting of SEQ ID NOs:463, 464, 465, 466, 467, 468, and 469; and a VH chain comprising a CDR1 amino acid sequence selected from the group consisting of SEQ ID NOs:483, 484, 485, 486, 487, 488, 489, and 490, a CDR2 amino acid sequence selected from the group consisting of SEQ ID NOs:470, 471, 472, 473, 474, 475, 476, 477, and 478, and a CDR3 amino acid sequence selected from the group consisting of SEQ ID NOs:453, 454, 455, 456, 457, 458, 459, 460, 461, and 462. In one embodiment, the radiolabeled activatable anti-PDL-1 antibody comprises a VL chain comprising a CDR1 amino acid sequence selected from the group consisting of SEQ ID NOs:499, 505, and 511, a CDR2 amino acid sequence selected from the group consisting of SEQ ID NOs:500, 506, and 512, and a CDR3 amino acid sequence selected from the group consisting of SEQ ID NOs:501, 507, and 513; and a VH chain comprising a CDR1 amino acid sequence selected from the group consisting of SEQ ID NOs:496, 502, and 508, a CDR2 amino acid sequence selected from the group consisting of SEQ ID NO:497, 503, and 509, and a CDR3 amino acid sequence selected from the group consisting of SEQ ID NOs:498, 504, and 510. In another embodiment, the radiolabeled activatable anti-PDL-1 antibody comprises a VL chain comprising a CDR1 amino acid sequence selected from the group consisting of SEQ ID NOs:514 and 520, and a CDR2 amino acid sequence selected from the group consisting of SEQ ID NOs:515 and 521, and a CDR3 amino acid sequence selected from the group consisting of SEQ ID NOs:516 and 522; and a VH chain comprising a CDR1 amino acid sequence selected from the group consisting of SEQ ID NOs:517 and 523, a CDR2 amino acid sequence selected from the group consisting of SEQ ID NOs:518 and 524, and a CDR3 amino acid sequence corresponding to SEQ ID NO:519. In a further embodiment, the radiolabeled activatable anti-PDL-1 antibody comprises a VL chain comprising a CDR1 amino acid sequence selected from the group consisting of SEQ ID NOs:525, 531, and 536, a CDR2 amino acid sequence corresponding to SEQ ID NO:526, and a CDR3 amino acid sequence selected from the group consisting of SEQ ID NOs:527, 532, and 537; and a VH chain comprising a CDR1 amino acid sequence selected from the group consisting of SEQ ID NOs:528, 533, 538, 541, and 542, a CDR2 amino acid sequence selected from the group consisting of SEQ ID NO:529, 534, and 539, and a CDR3 amino acid sequence selected from the group consisting of SEQ ID NO:530, 535, and 540.

[0085] In another embodiment, the radiolabeled activatable anti-PDL-1 antibody comprises a VL chain comprising a CDR1 amino acid sequence selected from the group consisting of SEQ ID NOs:543 and 549, a CDR2 amino acid sequence selected from the group consisting of SEQ ID NOs:544 and 550, and a CDR3 amino acid sequence selected from the group consisting of SEQ ID NOs:546 and 552; and a VH chain comprising a CDR1 amino acid sequence selected from the group consisting of SEQ ID NOs:547 and 553, a CDR2 amino acid sequence selected from the group consisting of SEQ ID NOs:547 and 553, and a CDR3 amino acid sequence selected from the group consisting of SEQ ID NOs:548 and 554. In certain embodiments, the radiolabeled activatable anti-PDL-1 antibody comprises a VH chain comprising a CDR1 amino acid sequence corresponding to SEQ ID NO:555, a CDR2 amino acid sequence corresponding to SEQ ID NO:556, and a CDR3 amino acid sequence corresponding to SEQ ID NO:557. In other embodiments, the radiolabeled activatable anti-PDL-1 antibody comprises a VL chain comprising a CDR1 amino acid sequence selected from the group consisting of SEQ ID NOs:558, 564, 569, 575, and 581, a CDR2 amino acid sequence selected from the group consisting of SEQ ID NOs:559, 565, 570, 576, and 526, and a CDR3 amino acid sequence selected from the group consisting of SEQ ID NOs:560, 566, 571, and 577; and a VH chain comprising a CDR1 amino acid sequence selected from the group consisting of SEQ ID NOs:561, 567, 572, 578, 582, and 584, and a CDR2 amino acid sequence selected from the group consisting of SEQ ID NOs:562, 568, 573, 579, and 585, and a CDR3 amino acid sequence selected from the group consisting of the sequence, GAL, and amino acid sequences corresponding to SEQ ID NOs:563, 574, 580, 583, and 586. In a further embodiment, the radiolabeled activatable anti-PDL-1 antibody comprises a VL chain comprising a CDR1 amino acid sequence selected from the group consisting of the amino acid sequence, YVS, and SEQ ID NOs:587, 592, 598, 604, 613, 619, 625, 630, 636, 642, 648, 652, and 656, a CDR2 amino acid sequence selected from the group consisting of SEQ ID NOs:588, 593, 599, 550, 480, 614, 620, 626, 631, 637, and 643, and a CDR3 amino acid sequence selected from the group consisting of SEQ ID NOs:589, 594, 600, 605, 609, 615, 621, 627, 632, 638, 644, 649, 653, 657, and 661; and a VH chain comprising a CDR1 amino acid sequence selected from the group consisting of SEQ ID NOs:488, 595, 601, 606, 610, 616, 622, 425, 633, 639, 645, 658, and 662, a CDR2 amino acid sequence selected from the group consisting of SEQ ID NOs:590, 596, 602, 607, 611, 617, 623, 628, 634, 640, 646, 650, 654, and 659, and a CDR3 amino acid sequence selected from the group consisting of SEQ ID NOs:591, 597, 603, 608, 612, 624, 629, 635, 641, 647, 651, 655, 660, and 663.

[0086] In some embodiments, the radiolabeled activatable anti-PDL-1 antibody comprises a VL chain having a CDR1 amino acid sequence comprising SEQ ID NO:664, a CDR2 amino acid sequence comprising SEQ ID NO:665, and a CDR3 amino acid sequence comprising SEQ ID NO:666; and a VH chain having a CDR1 amino acid sequence comprising SEQ ID NO:667, a CDR2 amino acid sequence comprising SEQ ID NO:668, and a CDR3 amino acid sequence comprising SEQ ID NO:669. In a further embodiment, the radiolabeled activatable anti-PDL-1 antibody comprises a VL chain having a CDR1 amino acid sequence comprising SEQ ID NO:520, a CDR2 amino acid sequence comprising SEQ ID NO:521, and a CDR3 amino acid sequence comprising SEQ ID NO:523; and a VH chain having a CDR1 amino acid sequence comprising SEQ ID NO:524, a CDR2 amino acid sequence comprising SEQ ID NO:525, and a CDR3 amino acid sequence comprising SEQ ID NO:518.

[0087] In certain embodiments, the radiolabeled activatable anti-PDL-1 antibody comprises a VL chain having a CDR1 amino acid sequence comprising an amino acid sequence selected from the group consisting of SEQ ID NOs:670, 675, 684, 689, 693, 698, 701, 1075, 706, 698, 718, 723, 728, and 698, a CDR2 amino acid sequence selected from the group consisting of KAS, TAS, AAS, KVS, KIS, VAS, GAS, and VVS, and a CDR3 amino acid sequence selected from the group consisting of SEQ ID NOs:671, 676, 680, 685, 694, 702, 694, 707, 711, 694, 719, 724, 729, 733, and 694; and a VH chain having a CDR1 amino acid sequence selected from the group consisting of SEQ ID NOs:672, 677, 681, 686, 690, 695, 703, 1076, 708, 712, 715, 720, 725, 730, 734, 737, 740, 742, 744, 747, 750, 753, 756, 759, and 762, a CDR2 amino acid sequence selected from the group consisting of SEQ ID NOs:673, 678, 682, 687, 691, 696, 699, 704, 1077, 709, 713, 716, 721, 726, 731, 735, 738, 704, 743, 745, 748, 751, 754, 757, and 760, and a CDR3 amino acid sequence selected from the group consisting of SEQ ID NOs:674, 679, 683, 688, 692, 697, 700, 705, 710, 714, 717, 722, 727, 732, 736, 739, 741, 746, 749, 752, 755, 758, 761, and 763. In other embodiments, the radiolabeled activatable anti-PDL-1 antibody comprises a VL chain having a CDR1 amino acid sequence comprising SEQ ID NO:764, a CDR2 amino acid sequence comprising SEQ ID NO:765, and a CDR3 amino acid sequence comprising SEQ ID NO:766; and a VH chain having a CDR1 amino acid sequence comprising SEQ ID NO:767, a CDR2 amino acid sequence comprising SEQ ID NO:768, and a CDR3 amino acid sequence comprising SEQ ID NO:769. In further embodiments, the radiolabeled activatable anti-PDL-1 antibody comprises a VL chain having a CDR1 amino acid sequence comprising SEQ ID NO:770, a CDR2 amino acid sequence comprising SEQ ID NO:771, and a CDR3 amino acid sequence comprising SEQ ID NO:772; and a VH chain having a CDR1 amino acid sequence comprising SEQ ID NO:773, a CDR2 amino acid sequence comprising SEQ ID NO:774, and a CDR3 amino acid sequence comprising SEQ ID NO:775.

[0088] In some embodiments, the radiolabeled activatable anti-PDL-1 antibody comprises a VL chain having a CDR1 amino acid sequence comprising SEQ ID NO:776, a CDR2 amino acid sequence comprising SEQ ID NO:777, and a CDR3 amino acid sequence comprising SEQ ID NO:778; and a VH chain having a CDR1 amino acid sequence comprising SEQ DI NO:779, a CDR2 amino acid sequence selected from the group consisting of SEQ ID NOs:780, 782, and 784, and a CDR3 amino acid sequence selected from the group consisting of SEQ ID NOs:781 and 783. In a still further embodiment, the radiolabeled activatable anti-PDL-1 antibody comprises a VL chain having a CDR1 amino acid sequence selected from the group consisting of SEQ ID NOs:785, 791, 793, 799, 803, 809, 815, 819, 824, and 830, a CDR2 amino acid sequence selected from the group consisting of SEQ ID NOs:786, 794, 800, 804, 810, 816, 786, 825, and 786, and a CDR3 amino acid sequence selected from the group consisting of SEQ ID NOs:787, 795, 805, 811, 817, 820, 826, and 787; and a VH chain having a CDR1 amino acid sequence selected from the group consisting of SEQ ID NOs:788, 796, 801, 806, 812, 821, 827, and 788, a CDR2 amino acid sequence selected from the group consisting of SEQ ID NOs:789, 792, 797, 802, 807, 813, 818, 822, 828, and 831, and a CDR3 amino acid sequence selected from the group consisting of SEQ ID NOs:790, 798, 808, 814, 823, 829, and 832. In other embodiments, the radiolabeled activatable anti-PDL-1 antibody comprises a VH chain comprising a CDR1 amino acid sequence selected from the group consisting of SEQ ID NOs:833, 834, 835, 836, 837, 838, 839, 840, 841, 842, 843, 844, 845, 846, 847, 848, 849, 850, 851, 852, 853, 854, 855, 856, and 857.

[0089] Exemplary combinations of CDR amino acid sequences in radiolabeled activatable anti-PDL-1 antibodies employed in the embodiments of the present invention are provided in Table 1, below.

TABLE 1
Exemplary CDR combinations for a Radiolabeled Activatable Anti-PDL-1 Antibody

| VL | | | VH | | |
|---|---|---|---|---|---|
| VL CDR1 | VL CDR2 | VL CDR3 | VH CDR1 | VH CDR2 | VH CDR3 |
| (SEQ ID NO:) | (SEQ ID NO:) | (SEQ ID NO:) | (SEQ ID NO:) | (SEQ ID NO:) | (SEQ ID NO:) |
| 414 | 415 | 416 | 425 | 426 | 427 |
| 414 | 417 | 418 | 425 | 428 | 429 |
| 414 | 419 | 420 | 425 | 430 | 431 |
| 414 | 421 | 422 | 425 | 432 | 433 |
| 414 | 423 | 424 | 425 | 434 | 435 |
| 414 | 423 | 424 | 425 | 436 | 437 |
| 414 | 423 | 424 | 425 | 436 | 438 |
| 414 | 423 | 424 | 425 | 436 | 439 |
| 414 | 423 | 424 | 425 | 436 | 440 |
| 414 | 423 | 424 | 425 | 436 | 441 |
| 414 | 423 | 424 | 425 | 436 | 442 |
| 414 | 423 | 424 | 425 | 443 | 435 |
| 414 | 423 | 424 | 425 | 444 | 435 |
| 414 | 423 | 424 | 425 | 445 | 435 |
| 414 | 423 | 424 | 425 | 446 | 435 |
| 414 | 423 | 424 | 425 | 447 | 435 |
| 414 | 423 | 424 | 425 | 448 | 435 |
| 414 | 423 | 424 | 425 | 449 | 435 |
| 414 | 423 | 424 | 425 | 450 | 435 |
| 414 | 423 | 424 | 425 | 443 | 435 |
| 414 | 423 | 424 | 425 | 446 | 435 |
| 414 | 423 | 424 | 425 | 451 | 440 |
| 414 | 423 | 424 | 425 | 451 | 441 |
| 414 | 423 | 424 | 425 | 451 | 442 |
| 414 | 423 | 424 | 425 | 452 | 440 |
| 414 | 423 | 424 | 425 | 452 | 441 |
| 414 | 423 | 424 | 425 | 452 | 442 |
| 414 | 417 | 424 | 425 | 451 | 440 |

[0090] Additional examples of combinations of CDR amino acid sequences suitable for use in radiolabeled activatable anti-PDL-1 antibodies used in the embodiments of the present invention are provided in Table 2.

TABLE 2
Exemplary CDR combinations for a Radiolabeled Activatable anti-PDL-1 Antibody

| VL | | | VH | | |
|---|---|---|---|---|---|
| VL CDR1 | VL CDR2 | VL CDR3 | VH CDR1 | VH CDR2 | VH CDR3 |
| (SEQ ID NO:) | (SEQ ID NO: /*) | (SEQ ID NO:) | (SEQ ID NO:) | (SEQ ID NO:) | (SEQ ID NO: /*) |
| 491 | 479 | 463 | 483 | 470 | 453 |
| 492 | 417 | 464 | 484 | 471 | 454 |
| 493 | 480 | 465 | 485 | 472 | 455 |
| 494 | 481 | 466 | 486 | 473 | 456 |
| 495 | 482 | 467 | 487 | 474 | 457 |
| | | 468 | 488 | 475 | 458 |
| | | 469 | 489 | 476 | 459 |
| | | | 490 | 477 | 460 |
| | | | | 478 | 461 |
| 499 | 500 | 501 | 496 | 497 | 498 |
| 505 | 506 | 507 | 502 | 503 | 504 |
| 511 | 512 | 513 | 508 | 509 | 510 |
| 514 | 515 | 516 | 517 | 518 | 519 |
| 520 | 521 | 522 | 523 | 524 | |
| 525 | 526 | 527 | 528 | 529 | 530 |
| 531 | | 532 | 533 | 534 | 535 |
| 536 | | 537 | 538 | 539 | 540 |
| 543 | 544 | 545 | 546 | 547 | 548 |
| 549 | 550 | 551 | 552 | 553 | 554 |
| | | | 555 | 556 | 557 |
| 558 | 559 | 560 | 561 | 562 | 563 |
| 564 | 565 | 566 | 567 | 568 | GAL |
| 569 | 570 | 571 | 572 | 573 | 574 |
| 575 | 576 | 577 | 578 | 579 | 580 |
| 581 | 526 | | 582 | | 583 |
| | | | 584 | 585 | 586 |
| 587 | 588 | 589 | 488 | 590 | 591 |
| 592 | 593 | 594 | 595 | 596 | 597 |
| 598 | 599 | 600 | 601 | 602 | 603 |
| 604 | 550 | 605 | 606 | 607 | 608 |
| YVS | 480 | 609 | 610 | 611 | 612 |
| 613 | 614 | 615 | 616 | 617 | 618 |
| 619 | 620 | 621 | 622 | 623 | 624 |
| 625 | 626 | 627 | 425 | 628 | 629 |
| 630 | 631 | 632 | 633 | 634 | 635 |
| 636 | 637 | 638 | 639 | 640 | 641 |
| 642 | 643 | 644 | 645 | 646 | 647 |
| 648 | | 649 | | 650 | 651 |
| 652 | | 653 | | 654 | 655 |
| 656 | | 657 | 658 | 659 | 660 |
| | | 661 | 662 | | 663 |
| 664 | 665 | 666 | 667 | 668 | 669 |
| 520 | 521 | 523 | 524 | 525 | 518 |
| 670 | KAS | 671 | 672 | 673 | 674 |
| 675 | TAS | 676 | 677 | 678 | 679 |
| 675 | AAS | 680 | 681 | 682 | 683 |
| 684 | KVS | 685 | 686 | 687 | 688 |
| 689 | VAS | 694 | 690 | 691 | 692 |
| 693 | VAS | 694 | 695 | 696 | 697 |
| 698 | AAS | 702 | 695 | 699 | 700 |
| 701 | AAS | 694 | 703 | 704 | 705 |
| 1075 | GAS | 707 | 1076 | 1077 | 705 |
| 706 | AAS | 711 | 708 | 709 | 710 |
| 698 | AAS | 694 | 712 | 713 | 714 |
| 698 | AAS | 719 | 715 | 716 | 717 |
| 718 | AAS | 724 | 720 | 721 | 722 |
| 723 | AAS | 729 | 725 | 726 | 727 |
| 728 | VVS | 733 | 730 | 731 | 732 |
| 698 | AAS | 694 | 734 | 735 | 736 |
| | | 740 | 737 | 738 | 739 |
| | | 742 | 740 | 704 | 741 |
| | | 744 | 742 | 743 | 741 |
| | | 747 | 744 | 745 | 746 |
| | | 750 | 747 | 748 | 749 |
| | | 753 | 750 | 751 | 752 |
| | | 756 | 753 | 754 | 755 |
| | | 759 | 756 | 757 | 758 |
| | | 762 | 759 | 760 | 761 |
| | | | 762 | | 763 |
| 764 | 765 | 766 | 767 | 768 | 769 |
| 770 | 771 | 772 | 773 | 774 | 775 |
| 776 | 777 | 778 | 779 | 780 | 781 |
| | | | | 782 | 783 |
| 705 | 786 | 787 | 788 | 789 | 790 |
| 791 | 786 | 787 | 788 | 792 | 790 |
| 793 | 794 | 795 | 796 | 797 | 798 |
| 799 | 800 | 795 | 801 | 802 | 798 |
| 803 | 804 | 805 | 806 | 807 | 808 |
| 809 | 810 | 811 | 812 | 813 | 814 |
| 815 | 816 | 817 | 801 | 818 | 798 |
| 819 | 786 | 820 | 821 | 822 | 823 |
| 824 | 825 | 826 | 827 | 828 | 829 |
| 830 | 786 | 787 | 788 | 831 | 832 |

*Or amino acid sequence if fewer than 4 amino acid residues in amino acid sequence

[0091] In certain embodiments, the activatable anti-PDL-1 antibody employed in the radiolabeled activatable binding polypeptide has: (A) alight chain sequence that comprises (i) a MM comprising an amino acid sequence selected from the group consisting of SEQ ID NOs:84, 85, 86, 87, 88, 89, 90, 91, 92, 93, 94, 95, 96, 97, 98, 99, 100, 101, 102, 103, 104, 105, 106, 107, and 108; (ii) a CM comprising an amino acid sequence selected from the group consisting of SEQ ID NOs:1, 2, 3, 4, 5, 6, 7, 8, 9, 10, 11, 12, 13, 14, 15, 16, 17, 18, 19, 20, 21, 22, 23, 24, 25, 26, 27, 28, 29, 30, 31, 32, 33, 34, 35, 36, 37, 38, 39, 40, 41, 42, 43, 44, 45, 46, 47, 48, 49, 50, 51, 52, 53, 54, 55, 56, 57, 58, 59, 60, 61, 62, 63, 64, 65, 66, and 67; and (iii) a VL amino acid sequence comprising an amino acid sequence selected from the group consisting of SEQ ID NO: 110 and 112; and (B) a VH amino acid sequence comprising an amino acid sequence selected from the group consisting of SEQ ID NOs:114, 116, 118, 120, 122, 124, 126, 128, 130, 132, 134, 136, 140, 142, 144, 146, 148, 150, 152, 154, and 156. In some of these embodiments, the radiolabeled activatable binding polypeptide employed in the practice of the present invention comprises: (a) a light chain sequence that comprises (i) an MM that comprises an amino acid sequence corresponding to SEQ ID NO:90; (ii) a CM that comprises an amino acid sequence corresponding to SEQ ID NO:24; and (iii) a VL amino acid sequence comprising an amino acid sequence corresponding to SEQ ID NO: 112; and (B) a VH amino acid sequence comprising an amino acid sequence corresponding to SEQ ID NO:146.

[0092] In some embodiments, the activatable anti-PDL-1 antibody employed in the radiolabeled activatable binding polypeptide has a LC that comprises an amino acid sequence selected from the group consisting of SEQ ID NOs: 168, 170, 859, 861, 863, 865, 867, 869, 871, 873, 875, 877, 879, 881, 883, 885, 887, 889, 891, 893, 895, 897, 899, 901, 903, 905, 907, 909, 911, 913, 915, 917, 919, 921, 923, 925, 927, 929, 931, 933, 935, 937, 939, 941, 943, 945, 947, 949, 951, 953, 955, 957, 959, 961, 963, 965, 967, 969, 971, 973, 975, 977, 979, 981, 983, 985, 987, 989, 991 (which are encoded by polynucleotide sequences corresponding to SEQ ID NOs:858, 860, 862, 864, 866, 868, 870, 872, 874, 876, 878, 880, 882, 884, 886, 888, 890, 892, 894, 896, 898, 900, 902, 904, 906, 908, 910, 912, 914, 916, 918, 920, 922, 924, 926, 928, 930, 932, 934, 936, 938, 940, 942, 944, 946, 948, 950, 952, 954, 956, 958, 960, 962, 964, 966, 968, 970, 972, 974, 976, 978, 980, 982, 984, 986, 988, and 990, respectively); and a VH amino acid sequence that comprises the amino acid sequence of SEQ ID NO:146. In some embodiments, the activatable anti-PDL-1 antibody comprises a HC amino acid sequence comprising the amino acid sequence of SEQ ID NO:172. In certain embodiments, the LC has an amino acid sequence selected from the group consisting of SEQ ID NOs:992, 993, 994, and 995; and a VH amino acid sequence that comprises the amino acid sequence of SEQ ID NO:146. In other embodiments, the LC has an amino acid sequence selected from the group consisting of SEQ ID NOs:997, 999, 1001, 1003, 1005, 1007, 1009, 1011, 1013, 1015, 1017, and 1019 (which are encoded by polynucleotide sequences corresponding to SEQ ID NOs:996, 998, 1000, 1002, 1004, 1006, 1008, 1010, 1012, 1014, 1016, 1018, and 1020, respectively); and a VH amino acid sequence that comprises the amino acid sequence of SEQ ID NO:146. In further embodiments, the LC comprises an amino acid sequence selected from the group consisting of SEQ ID NOs:1021, 1022, 1023, 1024, 1025, 1026, 1027, 1028, 1028, 1029, 1029, 1030, 1031, 1032, 1033, 1034, 1036, 1037, 1038, 1040, 1041, 1042, 1043, 1044, 1045, 1046, 1047, 1048, 1049, 1050, 1051, 1052, 1053, 1054, 1055, 1056, 1057, 1058, and 1059; and a VH amino acid sequence that comprises the amino acid sequence of SEQ ID NO:146.

[0093] In some embodiments, the radiolabeled activatable anti-PDL-1 antibody is a single-chain variable fragment comprising an amino acid sequence selected from the group consisting of SEQ ID NOs:1061, 1063, 1065, 1067, and 1069 (encoded by the polynucleotide sequence corresponding to SEQ ID NOs:1060, 1062, 1064, 1066, and 1068, respectively).

[0094] The VH amino acid sequences described herein can be combined with human immunoglobulin heavy chain constant domains to yield, e.g., human IgG1 (SEQ ID NO:1071), a mutated human IgG4, e.g., human IgG4 S228P (SEQ ID NO:172), or mutated human IgG1 N2971 (SEQ ID NO:1074).

[0095] In some embodiments, the radiolabeled activatable anti-PDL-1 antibody comprises:

[0096] (a) a variable heavy chain complementarity determining region 1 (VH CDR1) comprising the amino acid sequence of SEQ ID NO:425;

[0097] (b) a variable heavy chain complementarity determining region 2 (VH CDR2) comprising an amino acid sequence selected from the group consisting of SEQ ID NOs: 436, 428, 430, 432, 434, 436, and 443-452; and

[0098] (c) a variable heavy chain complementarity determining region 3 (VH CDR3) comprising an amino acid sequence selected from the group consisting of SEQ ID NOs: 427, 429, 431, 433, 435, 437, and 438-442. In these embodiments, the radiolabeled activatable anti-PDL-1 antibody often further comprises:

[0099] (d) a variable light chain complementarity determining region 1 (VL CDR1) comprising the amino acid sequence of SEQ ID NO:414;

[0100] (e) a variable light chain complementarity determining region 2 (VL CDR2) comprising an amino acid sequence selected from the group consisting of SEQ ID NOs:415, 417, 419, 421, and 423; and

[0101] (f) a variable light chain complementarity determining region 3 (VL CDR3) comprising an amino acid sequence selected from the group consisting of SEQ ID NOs:416, 418, 420, 422, and 424. In certain of these embodiments, the VL CDR2 comprises the amino acid sequence of SEQ ID NO:417, the VL CDR3 comprises the amino acid sequence of SEQ ID NO:424, the VH CDR2 comprises the amino acid sequence of SEQ ID NO: 451, and the VH CDR3 comprises the amino acid sequence of SEQ ID NO: 440. Sometimes, the VL CDR2 comprises the amino acid sequence of SEQ ID NO:423, the VL CDR3 comprises the amino acid sequence of SEQ ID NO:424, the VH CDR2 comprises the amino acid sequence of SEQ ID NO:451, and the VH CDR3 comprises the amino acid sequence of SEQ ID NO:440. In some embodiments, the radiolabeled activatable anti-PDL-1 antibody comprises a variable light chain comprising the amino acid sequence of SEQ ID NO:112 and a variable heavy chain comprising the amino acid sequence of SEQ ID NO:146. The prodomain employed in these embodiments, may comprise an MM comprising an amino acid sequence selected from the group consisting of SEQ ID NOs:84-108. In certain embodiments, the MM comprises the amino acid sequence of SEQ ID NO:90. Often, the CM comprises the amino acid sequence of SEQ ID NO:24. In some embodiments, the radiolabeled activatable anti-PDL-1 antibody comprises a light chain amino acid sequence comprising the amino acid sequence of SEQ ID NO:971, or SEQ ID NO:969, or SEQ ID NO:170, or SEQ ID NO:168, or SEQ ID NO:146. In some of these embodiments, the radiolabeled activatable anti-PDL-1 antibody comprises a heavy chain amino acid sequence comprising the amino acid sequence of SEQ ID NO:172.

[0102] In some embodiments, the radiolabeled activatable anti-PDL-1 antibody comprises a light chain amino acid sequence comprising the amino acid sequence of SEQ ID NO:168 and a heavy chain amino acid sequence comprising the amino acid sequence of SEQ ID NO: 172. In other embodiments, the radiolabeled activatable anti-PDL-1 antibody comprises a light chain amino acid sequence comprising the amino acid sequence of SEQ ID NO:169 and a heavy chain amino acid sequence comprising the amino acid sequence of SEQ ID NO:172.

[0103] Additional activatable anti-PDL-1 antibodies, and portions thereof, that are suitable for use in the practice of the present invention include those described in WO 2016/149201, which is incorporated herein by reference in its entirety.

[0104] The activatable binding polypeptide may further comprise additional moieties conjugated thereto that impart an additional property or function to the corresponding activated binding polypeptide, such as, for example, extended half-life (by conjugation to a polyethylene glycol (PEG) moiety, a human serum albumin (HSA) moiety, and the like), cytotoxicity (by conjugation to all or part of a toxin, such as, for example, a dolastin or derivative thereof (e.g., auristatin E, AFP, MMAF, MMAE, MMAD, DMAF, DMAE, and the like, and derivatives thereof); a maytansinoid or derivative thereof; DM1; DM4, a duocarmycin or derivative thereof; a calicheamicin or derivative thereof; a pyrrolobenzodiazepine or derivative or dimer thereof; a heavy metal (e.g., barium, gold, platinum, and the like), a pseudomonas toxin A variant (e.g., PE38, ZZ-PE38, and the like), ZJ-101, OSW-1, a 4-nitrobenzyloxycarbonyl derivative of 06-benzylguanine, a topoisomerase inhibitor, hemiasterlin, cephalotaxine, homoharringonine, a pyrrolobenzodiazepine dimer, a pyrrolobenzodiazepene, a functionalized pyrrolobenzodiazepene, a functionalized pyrrolobenzodiazepene dimer, a calicheamicin, a podophyllotoxin, a taxane, a vinca alkaloid, and the like)), as well as any of a variety of other known cytotoxic agents; anti-viral activity (e.g., by conjugation to all or a portion of Acyclovir, Vira A, Symetrel, Turbostatin, a Phenstatin, Hydroxyphenstatin, Spongistatin 5, Spongistatin 7, Halistatin 1, Halistatin 2, Halistatin 3, a modified bryostatin, a halocomstatin, pyrrolobenzimadazole, cibrostatin6, doxaliform, an anthracycline analogue, a cemadotin analogue (e.g., CemCH2-SH)); antifungal activity (e.g., Nystatin, and the like); anti-neoplastic activity (e.g., by conjugation to Adriamycin, cerubidine, bleomycin, alkeran, velban, oncovin, fluorouracil, methotrexate, thiotepa, bisantrene, novantrone, thioguanine, procarabizine, cytarabine, and the like); anti-bacterial activity (e.g., by conjugation to an aminoglycoside, streptomycin, neomycin, kanamycin, amikacin, gentamicin, tobramycin, Streptomycin B, spectinomycin, ampicillin, sulfanilamide, polymyxin, chloramphenicol, and the like), anti-mycoplasmal activity (e.g., by conjugation to tylosine, spectinomycin, and the like); and other desirable other additional properties and functions. Moieties that impart such desired properties and functions can be readily conjugated to the BP using methods and linkers that are known in the art. Radionuclides that are suitable for use in the radiolabeled activatable binding polypeptides employed herein include any that are suitable for use in positron emission tomography. These include, for example, ¹¹¹In (half-life 67.3 hours), ¹³¹I (half-life 192.5 hours), ¹²³I (half-life 13.2 hours), ^{99m}Tc (half-life 6.0 hours), ¹⁷⁷Lu (half-life 159.5 hours), ⁸⁹Zr (half-life 78.4 hours), ¹²⁴I (half-life 100.2 hours), ⁶⁴Cu (half-life 12.7 hours), ⁸⁶Y (half-life 14.7 hours), ⁷⁰Br (half-life 16.1 hours), ¹⁸F (half-life 1.83 hours), ⁶⁸Ga (half-life 1.13 hours), and the like, corresponding to an ¹¹¹In-conjugated activatable binding polypeptide, an ¹³¹I-conjugated activatable binding polypeptide, an ¹²³I-conjugated activatable binding polypeptide, a ^{99m}Tc-conjugated activatable binding polypeptide, a ¹⁷⁷Lu-conjugated activatable binding polypeptide, a ⁸⁹Zr-conjugated activatable binding polypeptide, an ¹²⁴I-conjugated activatable binding polypeptide, a ⁶⁴Cu-conjugated activatable binding polypeptide, a ⁸⁶Y-conjugated activatable binding polypeptide, a ⁷⁰Br-conjugated activatable polypeptide, a ¹⁸F-conjugated activatable binding polypeptide, and a ⁶⁸Ga-conjugated activatable polypeptide, respectively. In some embodiments, the radionuclide is ⁸⁹Zr.

[0105] The radionuclide is often present in the activatable binding polypeptide at a radionuclide:activatable binding polypeptide conjugation ratio in the range of from about 0.5 to about 3.0, or from about 0.5 to about 2.0, or from about 0.5 to about 1.5. The radiolabeled activatable binding polypeptide is often prepared by reacting a conjugated activatable binding polypeptide intermediate with the radionuclide to thereby label the activatable antibody. As used herein, the term “conjugated activatable binding polypeptide intermediate” refers to an activatable binding polypeptide that has conjugated thereto a labeling moiety that is capable of forming a bond with the radionuclide. Typically, conjugation of the labeling moiety to the activatable binding polypeptide is via a covalent bond. Usually, the labeling moiety and thus, the radionuclide, is conjugated to the activatable binding polypeptide at an amino acid residue within the portion of the activatable binding polypeptide that is conserved in the corresponding activated binding polypeptide. In some embodiments, the labeling moiety is conjugated to the activatable binding polypeptide at an amino acid residue in a region selected from the group consisting of a variable region and a constant region of the activatable binding polypeptide. Often, the labeling moiety is conjugated to the activatable binding polypeptide via a linkage selected from the group consisting of an amide linkage and an ester linkage. In some embodiments, the labeling moeity is conjugated to a lysine residue and/or arginine residue. Often, the reactive moiety is conjugated to a lysine residue.

[0106] In an exemplary embodiment, the labeling moiety comprises a chelation moiety. The term “chelation moiety” refers to a moiety that is capable of forming one or more bonds with the radionuclide. In these embodiments, the radiolabeled activatable binding polypeptide further comprises a chelation moiety to which the radionuclide is chelated. When a chelation moiety is employed, it is conjugated to an amino acid residue in the activatable antibody. The chelation moiety may comprise a further substituent to facilitate and direct conjugation to the activatable binding polypeptide. In some embodiments, the further substituent comprises a succinyl substituent (i.e., the chelation moiety comprises succinyldeferoxamine (also referred to as “succinyldesferal”)). In some embodiments, the conjugated activatable binding polypeptide intermediate is an N-succinyldesferal activatable binding polypeptide. The present invention further provides conjugated activatable binding polypeptide intermediates N-succinyldesferoxamine-Fe (prepared by reacting N-succinyldesferal with Fe (III)) and 2,3,5,6-tetrafluorophenol (TFP)-N-succinyldesferal-Fe (prepared by reacting tetrafluorophenol with N-succinyldesferoxamine-Fe). The type of bond through which conjugation occurs will often depend on the nature of the chelation moiety and the amino acid residue targeted for conjugation.

[0107] Exemplary conjugated activatable binding polypeptide that comprise chelation moieties include those which result from reaction of the activatable binding polypeptide with chelation agents such as, for example, diethylenetriaminepentaacetic acid (DTPA), ethylenediaminetetraacetic acid (EDTA), 1,4,7,10-tetraacetic acid (DOTA), deferoxamine (DFO, sold under the brand name, DESFERAL (deferoxamine mesylate (i.e., N′[(Acetyl-hydroxy-amino)pentyl]-N-[5-[3-(5-aminopentyl-hydroxy-carbamoyl)propanoylamino]pentyl]-N-hydroxy-butane diamide), and the like. Thus, the structure of the chelation moiety corresponds to the structure of the structure of the chelation agent with the exception of the portion of the chelation agent that is conjugated to the amino acid residue of the activatable binding polypeptide. Thus, in some embodiments, the chelation moiety may comprise a structure corresponding to a chelation agent selected from the group consisting of diethylenetraminepentaacetic acid, ethylenediaminetetraacetic acid, 1,4,7,10-tetraacetic acid, and deferoxamine. Often, the radiolabeled activatable binding polypeptide comprises a chelation moiety comprising a structure corresponding to deferoxamine.

[0108] Known methods for preparing radiolabeled antibodies using chelation agents are suitable for preparing the radiolabeled activatable binding polypeptides employed herein. These methods are described in, for example, Chan, et al., Pharmaceuticals (2012) 5:79-91, van de Watering, et al., BioMed Research International Vol. 2014, Article ID 203601 (2014), Zhang, et al., Curr. Radiopharm. (2011) 4(2):131-139, and LeBeau, et al., Cancer Res. (2015) 75(7):1225-1235, Verl, et al., J. Nucl. Med. (2003) 44:1271-1281, Vosjan, et al., Eur. J. Nucl. Med. Mol. Imaging (2011) 38:753-763, each of which is incorporated herein by reference in their entireties.

[0109] The present invention further provides a method of making a radiolabeled activatable binding polypeptide comprising reacting a radionuclide with an activatable binding polypeptide or conjugated activatable binding polypeptide intermediate under conditions sufficient to form a bond between the radionuclide and the activatable binding polypeptide or labeling moiety. In one embodiment, the radiolabeled activatable binding polypeptide comprises a labeling moiety that comprises deferoxamine. In another embodiment, the method further comprises complexing the deferoxamine component of the labeling moiety with Fe (III) prior to the step of reacting a radionuclide with the activatable polypeptide or conjugated activatable binding polypeptide intermediate.

[0110] In one embodiment, the radiolabeled activatable binding polypeptide (and chelation moiety) comprises a radiolabeled N-succinyldesferal activatable binding polypeptide (i.e., comprises an N-succinyldesferal (N-sucDf) moiety chelated to the radionuclide, wherein the N-succinyldesferal moiety is conjugated to the activatable binding polypeptide. In a specific embodiment, the present invention provides a radiolabeled N-succinimidyl desferal activatable binding polypeptide. In certain embodiments, the radiolabeled activatable binding polypeptide is an ⁸⁹-conjugated N-succinimidyl desferal activatable binding polypeptide, such as, for example, an ⁸⁹Zr-conjugated N-succinimidyl desferal activatable antibody.

[0111] In some embodiments, the radiolabeled activatable binding polypeptide comprises an N-succinyldesferal-⁸⁹Zr substituent. An exemplary method for carrying out the conjugation of a monoclonal antibody with ⁸⁹Zr via a desferal and N-succinyldesferal-Fe synthetic route is described in Veral, et al., “⁸⁹Zr Immuno-PET: Comprehensive Procedures for the Production of ⁸⁹Zr-Labeled Monoclonal Antibodies,” J. Nucl. Med. (2003) 44(8): 1271.

[0112] During the course of manufacture of radiolabelled activatable binding polypeptide, it may be desired to produce and store conjugation intermediates prior to labeling the conjugation intermediate with the radiolabel, or, alternatively, carry out the labeling of the conjugation intermediate at a different facility. In this regard, the present invention provides a stable conjugation intermediate comprising an activatable binding polypeptide having conjugated thereto a chelation moiety. The dose of a radiolabeled activatable binding polypeptide (i.e., the “tracer” dose) is often administered in the form of a composition comprising a radiolabeled activatable binding polypeptide and one or more of a suitable carrier, an excipient, and/or other agent(s) that are incorporated into pharmaceutical formulations to provide improved transfer, delivery, tolerance, stability, and the like. In some embodiments, the carrier is a physiological saline solution (i.e., 0.9% NaCl), a saccharide solution (e.g., dextrose, and the like), an alcohol (e.g., ethanol), a polyol (e.g., a polyalcohol, such as, for example, mannitol, sorbitol, and the like), a glycol, such as ethylene glycol, propylene glycol, PEG, a coating agent, an isotonic agent, such as mannitol or sorbitol, an organic ester, such as ethyoleate, an absorption-delaying agent, such as aluminum monostearate and gelatins and the like. The composition can be in the form of a stable, aqueous solution. The aqueous solution may comprise an isotonic vehicle such as sodium chloride, Ringer's injection solution, dextrose, lactated Ringer's injection solution, or equivalent delivery vehicle (e.g., sodium chloride/dextrose injection solution). The composition may comprise aqueous and non-aqueous, isotonic sterile injection solutions, which can include solvents, co-solvents, antioxidants, reducing agents, chelating agents, buffers, bacteriostats, antimicrobial preservatives and solutes that render the composition isotonic with the blood of the intended recipient (e.g., PBS and/or saline solutions, such as 0.1 M NaCl) and aqueous and non-aqueous sterile suspensions that can include suspending agents, solubilizers, thickening agents, emulsifying agents, stabilizer, preservatives, and the like. Suitable agents can be found in Remington's Pharmaceutical Science (15th ed. Mack Publishing Company, Easton, Pa. (1975)), which is incorporated herein by reference in its entirety.

[0113] In some embodiments, the tracer dose comprises about 5 MBq or less of the radiolabeled activatable binding polypeptide. In other embodiments the dose comprises a quantity of radiolabeled activatable binding polypeptide corresponding to a radiation activity in the range of from about 1 MBq to about 5 MBq, or from about 1 MBq to about 4.5 MBq, or from about 1 MBq to about 4 MBq, or from about 2 MBq to about 4 MBq. In certain embodiments, the tracer dose comprises a quantity of radiolabeled activatable binding polypeptide corresponding to a radiation activity of about 3.7 MBq (100 μCi). The tracer dose is typically administered in the form of a composition comprising the radiolabeled activatable binding polypeptide and a carrier. The carrier in the composition of the tracer dose (i.e., “tracer dose composition”) is typically a liquid phase carrier. Typically, the mammalian subject is a human or non-human mammal suspected of having a disease or disorder. Usually the suspected disease or disorder is a cancer, as described in more detail hereinbelow.

[0114] In some embodiments, administration of the dose of radiolabeled activatable binding polypeptide is accompanied by administration of a blocking dose of corresponding non-radiolabeled (or “cold”) activatable binding polypeptide. The doses of radiolabeled and non-radiolabeled activatable binding polypeptide may be administered as a single dose of a composition comprising both radiolabeled and non-radiolabeled activatable binding polypeptide, or may be administered in two steps as a dose of cold activatable binding polypeptide and a dose of radiolabeled activatable binding polypeptide. When a blocking dose is administered, it is usually administered prior to administering the dose of radiolabeled activatable binding polypeptide to pre-block non-specific antigen sinks.

[0115] In some embodiments, the blocking dose comprises cold activatable binding polypeptide in quantity that is in the range of from about 0.1 mg/Kg to about 10 mg/Kg, or may be in the range of from about 0.2 mg/Kg to about 10 mg/Kg, or from about 0.3 mg/Kg to about 10 mg/Kg, or from about 0.01 mg/Kg to about 0.3 mg/Kg, or from about 0.01 mg/Kg to about 0.2 mg/Kg, or from about 0.01 mg/Kg to about 0.1 mg/Kg. In some embodiments, the blocking dose comprises the cold activatable binding polypeptide in a quantity that is less than a therapeutic dose. In some embodiments, the blocking dose comprises a fixed dose of about 5 mg or a dose of about 0.07 mg/Kg.

[0116] As used herein, the term “therapeutic dose” refers to a quantity of cold activatable binding polypeptide that lessens one or more symptoms of the disease or disorder. In certain embodiments, the blocking dose comprises the cold activatable binding polypeptide in a quantity that is about 0.1 mg/Kg, or about 0.2 mg/Kg, or about 0.3 mg/Kg, or about 1 mg/Kg, or about 3 mg/Kg, or about 10 mg/Kg. In some embodiments, the blocking dose comprises the cold activatable binding polypeptide in a quantity that is less than about 0.3 mg/Kg, or less than about 0.2 mg/Kg, or less than about 0.1 mg/Kg, but greater than about 0.01 mg/Kg.

[0117] In some embodiments, no blocking dose or a de minimus quantity of the corresponding cold activatable binding polypeptide is administered to the mammalian subject. The term a “de minimis quantity of the corresponding cold activatable binding polypeptide” refers to a quantity of the corresponding cold activatable binding polypeptide that results in no detectable difference in resulting PET image when compared to the situation where no blocking dose is administered to the subject. Administration of a relatively small blocking dose, or omission of a blocking dose, may lead to greater uptake of activated binding polypeptide in the target organ or tissue. As depicted in FIG. 3A (Example 1), tumor uptake of an ⁸⁹Zr-labeled activatable binding polypeptide in a mouse model was greatest when no corresponding unlabeled activatable binding polypeptide was administered.

[0118] Treated subjects are typically subjected to positron emission tomography (PET) scanning at one or more time-points in the period of from about 1 day to about 10 days post tracer dose administration. In some embodiments, the treated subject is subjected to PET scanning at a time point in the period of from about 2 days to about 10 days post tracer dose administration, or in the period of from about 2 days to about 9 days post tracer dose administration, or in the period of from about 2 days to about 8 days post tracer dose administration, or in the period of from about 2 days to about 7 days post tracer dose administration, or in the period of from about 3 days to about 10 days post tracer dose administration, or in the period of from about 3 days to about 9 days post tracer dose administration, or in the period of from about 3 days to about 8 days post tracer dose administration. In certain embodiments, the treated subject is subjected to PET scanning at day 2, and/or day 4, and/or day 7 post tracer dose administration. In other embodiments, the treated subject is subjected to PET scanning at day 1, and/or day 3, and/or day 6 post tracer dose administration.

[0119] Typically, the resulting PET scan covers an area that includes one or more organs or tissue corresponding to the heart, blood, lung, liver, kidney, pancreas, stomach, ilium, colon, muscle, bone, skin, brain, thymus, brown adipose tissue (BAT), spleen, and/or tumor. Usually the PET scan covers an area that includes all or a portion of a tumor. In some embodiments, the PET scan covers an area that includes all or a portion of a tumor and all or a portion of at least one other organ or tissue type.

[0120] Detection of radionuclide in the PET scan indicates the presence of activated binding polypeptide and the location and thus the in vivo biodistribution of activated binding polypeptide in the mammalian subject. Detection of activated binding polypeptide indicates not only that the administered activatable binding polypeptide was activated, e.g., by proteases in the target microenvironment, but that the biological target was also present.

[0121] The method may be further used to identify subjects more likely to benefit from treatment with a particular activatable binding polypeptide. For example, if the biodistribution indicates the presence of activated binding polypeptide in a tumor, the subject may be more likely to benefit from the administration of an activatable binding polypeptide designed to treat the associated cancer. Thus, the present invention provides a method for identifying a mammalian subject suitable for treatment with an activatable binding polypeptide, the method comprising:

[0122] detecting the in vivo distribution of an activated binding polypeptide in a mammalian subject in accordance with the method of detecting the in vivo distribution of an activated binding polypeptide, as described herein, and

[0123] identifying the mammalian subject as being suitable for treatment with the activatable binding polypeptide if the radionuclide is detectably present within the PET image of the tumor. In some embodiments, the method further comprises obtaining a tumor tissue sample from the subject.

[0124] In one embodiment, the mammalian subject has been previously diagnosed with a disease or disorder. Often, the disease or disorder is a cancer. Exemplary types of cancer, include, for example, an advanced, unresectable solid tumor or lymphoma (e.g., a PDL1-responsive tumor type); a carcinoma such as, for example, carcinoma squamous cell carcinoma, an anal squamous cell carcinoma, gastric carcinoma, bowel carcinoma (such as, for example, small bowel carcinoma or small bowel adenocarcinoma), hepatocellular carcinoma, or a basal cell carcinoma; bladder cancer; bone cancer; breast cancer, such as, for example, triple negative breast cancer (TNBC) or estrogen receptor positive breast cancer; a carcinoid; castration-resistant prostate cancer (CRPC), cervical carcinoma, colon cancer (such as, for example, a colon adenocarcinoma); cutaneous squamous cell carcinoma, colorectal cancer (CRC), endometrial cancer, esophageal cancer, gastroesophageal junction cancer, glioblastoma/mixed glioma, glioma, head and neck cancer, hematologic malignancy, such as, for example, a lymphoma (such as, for example, a B-cell lymphoma, a T-cell lymphoma, Hodgkin's lymphoma, an EBV lymphoma, or a primary mediastinal B-cell lymphoma) or a leukemia; liver cancer, lung cancer (such as, for example, non-small cell lung cancer (NSCLC) (such as, for example, non-squamous NSCLC or squamous NSCLC) or small cell lung cancer); melanoma, Merkel cell carcinoma, multiple myeloma, nasopharyngeal cancer, osteosarcoma, ovarian cancer, pancreatic cancer, peritoneal carcinoma, undifferentiated pleomorphic sarcoma, prostate cancer (such as, for example, small cell neuroendocrine prostate cancer); rectal carcinoma, renal cancer (such as, for example, a renal cell carcinoma or a renal sarcoma); sarcoma, salivary gland carcinoma, squamous cell carcinoma, stomach cancer, testicular cancer, thymic carcinoma, thymic epithelial tumor, thymoma, thyroid cancer, urogenital cancer, urothelial cancer, uterine carcinoma, uterine sarcoma, and the like. In some embodiments, the cancer is a High Tumor Mutational Burden (hTMB) cancer.

[0125] Often, the mammalian subject has been previously diagnosed as having melanoma. In carrying out the practice of the present invention, some mammalian subjects have been previously diagnosed as having a cancer selected from the group consisting of undifferentiated pelomorphic sarcoma, small bowel adenocarcinoma, Merkel cell carcinoma, thymic carcinoma, anal squamous cell carcinoma, cutaneous squamous cell carcinoma, and triple negative breast cancer.

[0126] In a further embodiment, the present invention provides a method of treating a mammalian subject in need thereof with an activatable binding polypeptide, the method comprising:

[0127] identifying a mammalian subject suitable for treatment with an activatable binding polypeptide in accordance with the methods of the present invention; and

[0128] administering to the mammalian subject a therapeutically effective dose of the activatable binding polypeptide.

[0129] In carrying out the methods described herein, typically, the mammalian subjects are human. As used herein, the term, “therapeutically effective dose” refers to a quantity of activatable binding polypeptide effective in alleviating a symptom of a disease or disorder when administered either once, or in a series over a period of time. Therapeutically effective doses for anti-PDL-1 activatable antibodies can be found, for example, in WO 2018/222949, which is incorporated herein by reference. For example, when the activatable binding polypeptide is an activatable anti-PDL-1 antibody, the therapeutically effective dose may be in a range of from about 0.3 mg/kg to about 15 mg/kg (e.g., human), or in the range of from about 0.3 mg/kg to about 10 mg/kg, or in the range of from about 3 mg/kg to about 15 mg/kg, or in the range of from about 3 mg/kg to about 10 mg/kg (e.g., human). In some embodiments, the therapeutically effective dose is about 0.3 mg/kg, or is about 1 mg/kg, or is about 3 mg/kg, or is about 6 mg/kg (e.g., human).

### Compounds and Compositions

[0130] In another aspect, the present invention provides an ⁸⁹Zr-conjugated activatable binding polypeptide that is a useful as a tracer in connection with PET imaging a tumor in a mammalian subject. In some embodiments the ⁸⁹Zr-conjugated activatable binding polypeptide is an ⁸⁹Zr-conjugated activatable antibody, which may comprise any of the activatable anti-PDL-1 antibodies (including portions thereof) described herein. In a specific embodiment, the ⁸⁹Zr-conjugated activatable binding polypeptide is a ⁸⁹Zr-conjugated N-succinimidyl desferal activatable anti-PDL-1 antibody, which may comprise any of the activatable anti-PDL-1 antibodies (including portions thereof) described herein.

[0131] In a further embodiment, the present invention provides a composition comprising a radiolabeled activatable binding polypeptide and a carrier, wherein the radiolabeled activatable binding polypeptide comprises a radionuclide and an activatable binding polypeptide, wherein the activatable binding polypeptide comprises a binding moiety and a prodomain, wherein the prodomain comprises a masking moiety and a cleavable moiety. Radiolabeled activatable binding polypeptides that are suitable for use in the compositions of the present invention include any of those described hereinabove. Carriers that may be employed include any known in the art that are suitable for use in pharmaceutical products, and include those described hereinabove. The compositions may further include pharmaceutically acceptable excipients and additives. Carriers, excipients, and agents that may be employed in the practice of the present invention may be found in Remington's Pharmaceutical Science (15th ed. Mack Publishing Company, Easton, Pa. (1975)), which is incorporated herein by reference in its entirety. The compositions may further comprise a corresponding non-radiolabeled activatable binding polypeptide.

[0132] In one embodiment, the composition comprises the radiolabeled activatable binding polypeptide and a solid phase carrier. In these embodiments, the composition is typically in lyophilized form. Prior to administering the radiolabeled activatable binding polypeptide to the mammalian subject, the composition is reconstituted to a solution form by addition of a liquid to form the tracer dose composition, where the tracer dose composition comprises the radiolabeled activatable binding polypeptide at the desired quantity in the tracer dose. Typically, the liquid is physiological saline (0.9% NaCl). The term “tracer dose composition” refers to the composition of the tracer dose that is administered to the mammalian subject. In other embodiments, the composition comprises the radiolabeled activatable binding polypeptide and a liquid phase carrier. This composition may be the tracer dose composition, or it may be a composition that is diluted by addition of a liquid, e.g., physiological saline (0.9% NaCl), to a tracer dose composition comprising the radiolabeled activatable binding polypeptide at the desired quantity in the tracer dose.

[0133] In a further embodiment, the present invention provides a composition that is stable after storage at a temperature in the range of from about 2 to about 8° C. for a time period of at least about 1 month, or at least about 3 months, or at least about 6 months, or at least about 12 months, with respect to one or more properties selected from the group consisting of concentration of aggregates, concentration of radiolabeled activatable binding polypeptide, pH, and radiochemical purity. Often, the time period is at least about 6 months. In some embodiments, the composition is stable with respect to one or more of the above-described properties after a period of at least about 12 months. As used, herein, the term “stable” means that a metric associated with the specified property has not changed more than 20% from a measurement of the metric taken at an initial time point, just prior to implementation of the storage conditions. In some embodiments, the property remains within about 15%, or within about 14%, or within about 13%, or within about 12%, or within about 11%, or within about 10%, or within about 9%, or within about 8%, or within about 7%, or within about 6%, or within about 5%, or within about 4%, or within about 3%, or within about 2% or within about 1% of the same property at an initial time point. Concentration of aggregates is measured by Size Exclusion (SE)-HPLC measured at 280 nm. Concentration of radiolabeled activatable binding polypeptide may be determined by UV spectrophotometry. Radiochemical purity is determined by TCA assay. Often, the stable composition comprises an ⁸⁹Zr-conjugated N-succinimidyl desferal activatable binding polypeptide, such as, for example an ⁸⁹Zr-conjugated N-succinimidyl desferal activatable anti-PDL-1 antibody (including portions thereof) in accordance with any of the embodiments described herein, having a radionuclide:activatable binding polypeptide conjugation ratio in the range of from about 0.5 to about 3.0, or from about 0.5 to about 2.0, or from about 0.5 to about 1.5. In a specific embodiment, the stable composition comprises an ⁸⁹Zr-conjugated N-succinimidyl desferal activatable anti-PDL-1 antibody comprising a light chain sequence comprising the amino acid sequence of SEQ ID NO:168 and a heavy chain amino acid sequence comprising the amino acid sequence of SEQ ID NO:172.

[0134] Often, the concentration of aggregates remains at a level of less than 5% of the composition after the storage period of about 6 or 12 months, under the storage conditions described hereinabove. The concentration of radiolabeled activatable binding polypeptide in the composition often remains within 15%, or within 10%, or within 5% of the initial concentration of the radiolabeled activatable binding polypeptide, after a period of about 6 or 12 months, under the storage conditions described hereinabove. The pH of the composition often remains within 5%, or within 4%, or within 3%, or within 2%, or within 1% of an initial pH, after a period of about 6 or 12 months, under the storage conditions described hereinabove. The radiochemical purity of the composition often is at least 95%, or at least 96%, or at least 97%, or at least 98%, or at least 99% of an initial radiochemical purity, after a period of about 5 or 12 months, under the storage conditions described hereinabove.

### SPECIFIC EMBODIMENTS OF THE PRESENT INVENTION

[0135] Embodiments of the invention include the following:

[0136] 1. A method for detecting an in vivo distribution of an activated binding polypeptide in a subject, the method comprising:

[0137] administrating to a mammalian subject a tracer dose of a radiolabeled activatable binding polypeptide,
[0138] wherein the radiolabeled activatable binding polypeptide comprises a radionuclide and an activatable binding polypeptide,
   [0139] wherein the activatable binding polypeptide comprises a prodomain and a binding moiety, wherein the prodomain comprises a masking moiety and a cleavable moiety,
   [0140] wherein, when the radiolabeled activatable binding polypeptide is activated, a radiolabeled activated binding polypeptide is generated that is capable of specifically binding, in vivo, a biological target; and

[0141] imaging the mammalian subject using positron emission tomography (PET) at a time point following administration of the tracer dose.

[0142] 2. The method of embodiment 1, wherein the radionuclide is selected from the group consisting of ¹¹¹In, ¹³¹I, ¹²³I, ^{99m}Tc, ¹⁷⁷Lu, ⁸⁹Zr, ¹²⁴I, ⁶⁴Cu, ⁸⁶Y, ⁷⁰Br, ¹⁸F, and ⁶⁸Ga.

[0143] 3. The method of embodiment 3, wherein the radionuclide is ⁸⁹Zr.

[0144] 4. The method of any of embodiments 1-3, wherein the tracer dose comprises a quantity of the radiolabeled activatable binding polypeptide corresponding to a radiation activity in the range of from about 1 MBq to about 5 MBq, or from about 1 MBq to about 4.5 MBq, or from about 1 MBq to about 4 MBq, or from about 2 MBq to about 4 MBq.

[0145] 5. The method of embodiment 4, wherein the tracer dose comprises a quantity of the radiolabeled activatable binding polypeptide corresponding to a radiation activity of about 3.7 MBq.

[0146] 6. The method of any of embodiments 1-5, further comprising administration of a blocking dose to the mammalian subject, wherein the blocking dose comprising a corresponding non-radiolabeled activatable binding polypeptide.

[0147] 7. The method of embodiment 6, wherein administration of the blocking dose precedes administration of the tracer dose.

[0148] 8. The method of embodiment 6, wherein the blocking dose and tracer dose are administered as a single composition comprising the radiolabeled activatable binding polypeptide and the corresponding non-radiolabeled activatable binding polypeptide.

[0149] 9. The method of any of embodiments 6-8, wherein the blocking dose comprises a quantity of the corresponding non-radiolabeled activatable binding polypeptide in the range of from about 0.1 mg/Kg to about 10 mg/Kg, and may be in the range of from about 0.2 mg/Kg to about 10 mg/Kg, or from about 0.3 mg/Kg to about 10 mg/Kg.

[0150] 10. The method of any of embodiments 6-8, wherein the blocking dose comprises about 0.1 mg/Kg. or about 0.2 mg/Kg, or about 0.3 mg/Kg, or about 1 mg/Kg, or about 3 mg/Kg, or about 10 mg/Kg of the corresponding non-radiolabeled activatable binding polypeptide.

[0151] 11. The method of any of embodiments 6-8, wherein the blocking dose comprises the corresponding non-radiolabeled activatable binding polypeptide in a quantity that is less than about 0.3 mg/Kg, or less than about 0.2 mg/Kg, or less than about 0.1 mg/Kg, but greater than about 0.01 mg/Kg.

[0152] 12. The method of any of embodiments 1-11, wherein the imaging step occurs at a time point in the period of from about 1 day to about 10 days post tracer dose administration, or at a time point in the period of from about 2 days to about 10 days post tracer dose administration, or in the period of from about 2 days to about 9 days post tracer dose administration, or in the period of from about 2 days to about 8 days post tracer dose administration, or in the period of from about 2 days to about 7 days post tracer dose administration, or in the period of from about 3 days to about 10 days post tracer dose administration, or in the period of from about 3 days to about 9 days post tracer dose administration, or in the period of from about 3 days to about 8 days post tracer dose administration.

[0153] 13. The method of any of embodiments 1-12, wherein the mammalian subject is subjected to PET scanning at a time point corresponding to day 2, and/or day 4, and/or day 7 post tracer dose administration.

[0154] 14. The method of any of embodiments 1-13, wherein the imaging step results in a resulting PET scan that covers an area that includes one or more organs or tissue corresponding to the heart, blood, lung, liver, kidney, pancreas, stomach, ilium, colon, muscle, bone, skin, brain, thymus, brown adipose tissue (BAT), spleen, and/or tumor.

[0155] 15. The method of embodiment 14, wherein the PET scan covers an area that includes all or a portion of a tumor.

[0156] 16. The method of embodiment 15, wherein the PET scan covers an area that further covers at least all or a portion of one additional organ or tissue.

[0157] 17. The method of any of embodiments 1-16, wherein the activatable binding polypeptide is an activatable antibody.

[0158] 18. A composition comprising a radiolabeled activatable binding polypeptide and a carrier, wherein the radiolabeled activatable binding polypeptide comprises a radionuclide and an activatable binding polypeptide, wherein the activatable binding polypeptide comprises a binding moiety and a prodomain, wherein the prodomain comprises a masking moiety and a cleavable moiety.

[0159] 19. The composition of embodiment 18, wherein the radionuclide is selected from the group consisting of ¹¹¹In, ¹³¹I, ¹²³I, ^{99m}Tc, ¹⁷⁷Lu, ⁸⁹Zr, ¹²⁴I, ⁶⁴Cu, ⁸⁶Y, ⁷⁰Br, ¹⁸F, and ⁶⁸Ga.

### ACKNOWLEDGMENTS

[0160] The radiolabelling and PET imaging studies described herein were conducted at and in collaboration with the University Medical Center Groningen (UMCG), Hanzeplein 1, 9700 RB Groningen, The Netherlands.

[0161] The following examples further illustrate the invention, but should not be construed as limiting its scope in any way.

### EXAMPLES

### Example 1

### Biodistribution of a Radiolabeled Activatable Antibody

[0162] In this study, CX-072, an activatable anti-PD-L1 antibody corresponding to SEQ ID NO:168 (light chain sequence encoded by the polynucleotide sequence of SEQ ID NO:167) and SEQ ID NO:172 (heavy chain sequence encoded by the polynucleotide sequence of SEQ ID NO:171), a non-specific (non-binding) activatable antibody control (PbCtrl), and CX-075 (⁸⁹Zr-PDL1-Ab (having a heavy chain sequence corresponding to SEQ ID NO:174, and a light chain sequence corresponding to SEQ ID NO:175), were radiolabeled with 500 MBq/mg ⁸⁹Zr using the bifunctional chelator N-succinyldesferrioxamine-B-tetrafluorphenol (“desferal-N-suc-TFP” or “Df-suc-N-TFP”, ABX Gmbh). CX-072 was prepared as described in WO 2016/149201, which is incorporated herein by reference in its entirety. CX-072-N-sucDf, PbCtrl-N-sucDf, and CX-075-N-sucDf were purified using a Vivaspin-2 concentrator, aliquoted and stored at −80° C. Concentration and purity were determined by a Waters size exclusion high-performance liquid chromatography (SE-HPLC) system equipped with a dual-wavelength absorbance detector (280 nm versus 430 nm), in-line radioactivity detector and TSK-Gel SW column G3000SWXL 5 μm, 7.8 mm (joint Analytical Systems; mobile phase: phosphate buffered saline (PBS; 9.0 nM sodium phosphate, 1.3 mM potassium phosphate, 140 mM sodium chloride, pH 7.2) (Hospital Pharmacy UMCG); flow: 0.7 mL/min).

[0163] CX-072-N-sucDf, PbCtrl-N-sucDf and CX-075-N-sucDf were radiolabeled with clinical grade ⁸⁹Zr (Perkin Elmer) using the method described in Nagengast, et al., J. Nucl. Med. 48:1313-1310 (2007).

[0164] Immunoreactivity to PD-L1 of CX-072 and CX-075 after conjugation to TFP-N-sucDf was assessed by an indirect enzyme-linked immunosorbent assay (ELISA). 96-well plates (Nunc Maxisorp) were coated with 1 μg/mL human extracellular PD-L1 domain (R&D Systems; 156-B7-100) diluted in PBS (Givco; 0.7 mM sodium phosphate, 1.5 mM potassium phosphate, 154 mM sodium chloride, pH 7.2) and incubated overnight at 4° C. Wells were blocked for 2 hours at room temperature (RT) with 1% bovine serum albumin (Sigma-Adrich), 0.05% Tween 20 in PBS. After blocking, plates were incubated with either unconjugated CX-072, PbCtrl or CX-075 or their respective N-sucDf-conjugates in a concentration ranging from 0.00914 to 600 nM for 60 minutes at RT. Plates were subsequently washed with 0.05% Tween 20 in PBS and incubated with horseradish peroxidase-labeled anti-human IgG antibody (Sigma-Aldrich; A0293) for 60 minutes at RT. Detection was performed with single-component TMB peroxidase substrate (BioRad) and optical density read-out was performed at 450 nm using a micro plate-reader. Immunoreactivity to PD-L1 was expressed as the effective concentration needed for 50% of receptor occupation (EC50).

[0165] Immunoreactivity was determined by ELISA. The results showed that immunoreactivity to PD-L1 was preserved for CX-072-N-sucDf and CX-075 N-sucDf.

### Evaluation in MDA-MB-231 Tumor Model

[0166] For in vivo studies, PD-L1 expressing MDA-MB-231 triple negative human breast cancer cells (MD Anderson Cancer Center (Houston, Tex.) were subcutaneously (sc) engrafted in Balb/c nude mice. To assess tracer protein dose dependency of the tumor uptake (indicative of antigen-dependency of ⁸⁹Zr-CX-072 tumor uptake and potential for antigen saturation), mice received 10 μg ⁸⁹Zr-CX-072, 89Zr-PbCtrl, or CX-075 (˜5 MBq) supplemented with 0, 40, or 240 μg of non-radiolabeled CX-072, PbCtrl, or CX-075, respectively.

[0167] To evaluate ⁸⁹Zr-CX-072 biodistribution in an immune-competent setting, C57BL6 mice were implanted subcutaneously (sc) with low PD-L1 expressing MC38 syngeneic murine colon adenocarcinoma cells. All mice underwent serial in vivo PET imaging 1, 3 and 6 days post injection (pi), followed by tissue collection for ex vivo biodistribution. MicroPET images were quantified by mean standardized uptake value (SUVmean). A schematic depicting the in vivo study design is provided in FIG. 1. Activated antibody species were detected by Western capillary electrophoresis (Wes™ System, ProteinSimple). Tracer integrity in tumor lysates and plasma was assessed by SDS-PAGE. Autoradiography, PD-L1 immunofluorescence (IF) and PD-L1 immunohistochemistry (IHC) were performed on formalin-fixed paraffin-embedded 4 μm tumor slides.

[0168] All animal experiments were approved by the institutional animal care and use committee of the University of Groningen, and were performed in accordance with their guidelines. In vivo imaging and biodistribution experiments with 89Zr-CX-072 and 89Zr-PbCtrl were conducted in 5-7 week old male Balb-c/Ola HSD-fox nude (Balb-c/nude) or C57BL/6JOlaHsd (C57BL/6) mice obtained from Envigo. Male Balb-c/nude mice were injected subcutaneously (sc) on the right flank with 5.0×106 MDA-MB-231 cells in 0.3 mL PBS mixed equally with 0.3 mL Matrigel™ matrix (Corning). Male C57BL/6 mice were injected sc on the right flank with 1.5×106 MC38 cells (cell line derived from murine colon adenocarcinoma cells) mixed equally with 0.2 ml PBS. Animals were used for in vivo studies when the tumor volume measured≥200 mm3, 6-8 mm in diameter, approximately 4-5 weeks after inoculation.

[0169] Animals used for imaging and biodistribution studies were injected intravenously into the penile vein with 150 μl tracer solution, containing 10 μg ⁸⁹Zr-CX-072. 10 μg 89Zr-labeled non-binding isotype activatable antibody control (⁸⁹Zr-PBCtrl), or 10 g ⁸⁹Zr-CX-075 (5 MB1±0.5 MBq, 10 μg supplemented with 0, 40, 240 μg non-radiolabeled CX-072 or non-radiolabeled PBCtrl) resulting in total protein doses of 10, 50, 250 μg). Mice were subsequently scanned after 24, 72, and 144 h (i.e., 1 day, 3 days, and 6 days, respectively) post-injection (p.i.) using a Focus 220 microPET (CTI Molecular Imaging, Inc.) and subsequently sacrificed after the final scan. Organs of interest were excised, cleaned from blood and weighed. Samples and primed standards were counted in a calibrated well-type gamma-counter for radioactivity, and results expressed as percentage of injected dose per gram tissue (% ID/g).

[0170] MicroPET scans indicated that tumor uptake of ⁸⁹Zr-CX-072 in MDA-MB-231 xenograft bearing Balb-c/nude mice increased over time with maximal tumor uptake at 6 days (144 h) post injection, as shown in FIG. 2A. FIG. 2A provides a representative set of MicroPET images taken at 1 day (24 h), 3 days (72 h), and 6 days (144 h), post injection (p.i.) for 10 μg of ⁸⁹Zr-CX-072, ⁸⁹Zr-PBCtrl, and ⁸⁹Zr-CX-075 in MDA-MB-231 xenograft bearing Balb-c/nude mice.

[0171] Comparison of ⁸⁹Zr-CX-072 and ⁸⁹Zr-PBCtrl: PET imaging at 1 day (24 h) p.i. revealed high uptake by the heart (H) and other tissues for both tracers. In time, relative uptake in the tumor (T) increases for ⁸⁹Zr-CX-072, but not for ⁸⁹Zr-PBCtrl. Tracer blood pool decreased over time, while ⁸⁹Zr-CX-072, but not ⁸⁹Zr-PBCtrl, showed tracer tumor accumulation. Uptake of ⁸⁹Zr-CX-072 in MDA-MB-231 tumor and blood pool was quantified by SUVmean at 1, 3, and 6 days p.i. Tumor uptake was highest (SUVₘₑₐₙ 1.5±0.2) for 10 μg ⁸⁹Zr-CX-072 at 6 days p.i. ⁸⁹Zr-CX-072 tumor uptake in MDA-MB-231 xenografts appeared to be protein dose (target binding) dependent, as demonstrated by decreasing tumor ⁸⁹Zr-CX-072 uptake with increasing cold CX-072 dose, as shown in FIG. 3A (at 144 h post dose). In contrast, tumor uptake of ⁸⁹Zr-PBCtrl was low and not affected by the presence of unlabeled PBCtrl (FIG. 3A). The 10 μg total tracer protein dose of ⁸⁹Zr-CX-072 provided the highest contrast in tumor uptake, when compared to ⁸⁹Zr-PBCtrl, and was therefore considered the optimal tracer protein dose.

[0172] Uptake in other organs showed no difference between dose groups for both ⁸⁹Zr-CX-072 and ⁸⁹Zr-PBCtrl, as shown in FIG. 4A. ⁸⁹Zr-CX-072 tumor-to blood ratio (TBR) was significantly higher when compared to ⁸⁹Zr-PbCtrl (with a maximum TBR of 0.8 vs. 0.3 at 10 μg tracer protein dose), demonstrating target-specific tumor uptake of ⁸⁹Zr-CX-072 (FIG. 4A, insert).

[0173] Comparison of ⁸⁹Zr-CX-072, ⁸⁹Zr-PBCtrl, and ⁸⁹Zr-CX-075: PET imaging on day 1, 3, and 6 post intravenous injection (pi) revealed tumor accumulation over time for ⁸⁹Zr-CX-072 and ⁸⁹Zr-CX-075, but not for ⁸⁹Zr-PbCtrl as shown in FIG. 2A. As shown in FIG. 2A, tracer radioactivity in the blood pool decreased over time, resulting in increasing tumor to blood ratios for ⁸⁹Zr-CX-072 and ⁸⁹Zr-CX-075 from day 1 to 6 p.i. with highest tumor uptake at day 6 p.i.

[0174] ⁸⁹Zr-CX-075 showed clear uptake in spleen and lymph nodes on PET images, which was not visible for ⁸⁹Zr-CX-072 and ⁸⁹Zr-PbCtrl (FIG. 2A). PET quantification revealed an 1.5-fold higher spleen uptake for ⁸⁹Zr-CX-075 than for ⁸⁹Zr-CX-072 at day 6 p.i. (p<0.01) (FIGS. 2B-2D). ⁸⁹Zr-CX-075 spleen uptake was higher than blood pool levels, supporting that this uptake is PD-L1-mediated (FIGS. 2B-2D).

[0175] ⁸⁹Zr-CX-072 in the circulation remained intact at 6 days p.i., as confirmed by sodium dodecylsulphate polyacrylamide gel electrophoresis (SDS-PAGE).

[0176] Ex vivo analysis revealed decreasing ⁸⁹Zr-CX-072 tumor uptake from 8.7±1.0% ID/g at the 10 μg total protein dose to 6.0±1.3% ID/g and 4.3±0.7% ID/g for the 50 μg and 250 μg dose groups respectively indicating competition of tracer with the unlabeled CX-072 binding to PD-L1 receptor (FIG. 3B). Similarly, ⁸⁹Zr-CX-075 tumor uptake was reduced by unlabeled antibody (FIG. 3B). ⁸⁹Zr-PbCtrl tumor uptake was independent of total protein dose, confirming its non-specificity for PD-L1 target binding (FIG. 3B).

[0177] Although immune-compromised mice were used for this model, specific spleen uptake was observed for ⁸⁹Zr-CX-075, as demonstrated by decreased spleen uptake from 25.8±4.1% ID/g at the 10 μg total protein dose to 10.8±2.8% ID/g and 5.3±2.6% ID/g for the 50 μg and 250 g dose groups respectively. ⁸⁹Zr-CX-072 and ⁸⁹Zr-PbCtrl did not show dose-dependent spleen uptake, suggesting the CX-072 is not activated in this tissue which otherwise could lead to accumulation in this PD-L1 expressing spleen tissue (FIG. 3C).

[0178] Except for tumor, similar ex vivo biodistribution results were found for ⁸⁹Zr-CX-072 and ⁸⁹Zr-PbCtrl in other normal tissues (FIG. 4B). ⁸⁹Zr-CX-075 blood pool levels and uptake in the heart, however, were lower, while liver, pancreas, stomach, ilium, bone, skin and spleen uptake were higher compared to ⁸⁹Zr-CX-072. ⁸⁹Zr-CX-072 and ⁸⁹Zr-CX-075 showed comparable tumor uptake of 8.7±1.0% ID/g and 8.8±2.9% ID/g, respectively, for the 10 μg ⁸⁹Zr-PbCtrl (FIG. 4C). This suggests that the prodomain architecture affects biodistribution but not its tumor-targeting properties. Highest tumor uptake was found for 10 μg of ⁸⁹Zr-CX-072, therefore this total protein dose was selected for further in vivo studies.

[0179] To investigate whether CX-072 is activated by proteases in the tumor microenvironment and peripheral PD-L1-expressing organs, MDA-MB-231 tumor and spleen lysates were analyzed for the presence of activated CX-072 (FIG. 4D). MDA-MB-231 tumor lysates contained 6.9 ng/ml activated CX-072 species at the 10 μg total protein dose, 21.2 ng/ml at the 50 g total protein dose and highest concentration of 81.7 ng/ml was found for the 250 μg dose group (FIG. 4E). There was a 5.3-fold lower level of activated CX-072 detected in spleen at the 250 μg/total protein dose (p<0.05). This suggests that the activatable binding polypeptide is specifically activated in tumor tissue and remains predominantly within the tumor microenvironment.

[0180] Ex vivo macroscopic tracer visualization in paraffin-embedded formalin-fixed (FFPE) tumor tissue slices using autoradiography revealed a heterogeneous distribution pattern for ⁸⁹Zr-CX-072 and ⁸⁹Zr-CX-075. Immunohistochemistry showed PD-L1 staining in viable tumor tissue and to a lesser extent in necrotic tumor tissue, correlating to regions showing high uptake of ⁸⁹Zr-CX-072 on autoradiography. In contrast, ⁸⁹Zr-PbCtrl distributed to non-tumor tissue areas while PD-L1 expression was present in viable tumor indicating observed uptake is not PD-L1 specific. ⁸⁹Zr-CX-075 distributed mostly to PD-L1 expressing tumor, however, uptake in non-PD-L1 expressing, necrotic tumor tissue was also observed.

### Evaluation in Immune Competent Mouse Model Bearing MC38 Syngeneic Tumors

[0181] The biodistribution of ⁸⁹Zr-CX-072, ⁸⁹Zr-PBCtrl, and CX-075 (10 μg total tracer protein dose was evaluated by PET imaging in fully immune-competent MC38 xenograft bearing Cs57Bl/6 mice, in accordance with the method of the present invention. The MC38 cells were obtained from the University of Pittsburgh. FIG. 5A depicts representative maximum intensity projections of ⁸⁹Zr-CX-072, ⁸⁹Zr-CX-PbCtrl, and ⁸⁹Zr-CX-075 in the MC38 tumor-bearing mice imaged at 6 days p.i. H; heart, T: tumor, S: spleen, L: lymph node. FIGS. 5B and 5C depict ex vivo biodistribution of ⁸⁹Zr-CX-072 and ⁸⁹Zr-PbCtrl, and ⁸⁹Zr-CX-072, ⁸⁹Zr-PbCtrl, and ⁸⁹Zr-CX-075, respectively. As shown in FIG. 5B, ⁸⁹Zr-CX-072 showed significantly higher TBR at 144 h post-injection when compared to ⁸⁹Zr-PBCtrl (FIG. 5B, insert), however, the difference is smaller compared to the MDA-MB-231 xenograft model. ⁸⁹Zr-CX-072 and ⁸⁹Zr-CX-075 showed comparable tumor uptake at 6 days p.i., which 3.1-fold higher spleen uptake was observed for ⁸⁹Zr-CX-075 compared to ⁸⁹Zr-CX-072 (p<0.01) (FIG. 5C).

[0182] As shown in FIG. 5B (showing a comparison of tissue uptake for tracers ⁸⁹Zr-CX0-072 and ⁸⁹Zr-CX-PBCtrl) and 5D (showing a comparison of tissue tracer uptake for all three tracers, ⁸⁹Zr-CX-072, ⁸⁹Zr-PbCtrl, and ⁸⁹Zr-CX-075), uptake of ⁸⁹Zr-CX-072 by lymphoid tissues (e.g., spleen, lymph nodes, thymus) detected in immune-competent C57BL/6 mice was similar to (i.e., not significantly different than) that in the non-binding isotype control ⁸⁹Zr-PBCtrl Blood pool levels of ⁸⁹Zr-CX-075 were lower, while uptake was higher in liver, ilium and brain compared to ⁸⁹Zr-CX-072 (FIG. 5D). The organ-to-blood ratio of ⁸⁹Zr-CX-072, ⁸⁹Zr-PbCtrl, and ⁸⁹Zr-CX-075 in lymphoid tissues of the MC38 tumor bearing syngeneic mice 6 days p.i. is provided in FIG. 6B (i.e. spleen, mesenteric and axial lymph nodes (LN), thymus, brown adipose tissue (BAT), and MC38 tumor tissue). High ⁸⁹Zr-CX-075 uptake was also found in lymphoid tissues including spleen, mesenteric and axial lymph nodes, thymus and BAT (FIGS. 6A and 6B). In contrast, minor ⁸⁹Zr-CX-072 uptake was observed in these tissues, comparable with ⁸⁹Zr-PbCtrl. Thus, the results from these in vivo studies suggest that ⁸⁹Zr-CX-072 accumulates more in PD-L1 expressing tumor tissues than in lymphoid tissues. In addition, residual radioactivity measured in MDA-MB0231 and MC38 tumor-bearing mice at 1, 3, and 6 days p.i. suggests faster elimination of ⁸⁹Zr-CX-075 compared to ⁸⁹Zr-CX-072.

[0183] The results further showed that no significant target-mediated deposition of 89Zr-CX-072 was detected in C57BL/6 mouse lymphoid tissues, in contrast to results obtained for the corresponding parental antibody, CX-075.

[0184] Tracer integrity in tumor lysates and plasma was assessed by Western Capillary Electrophoresis (WES). FIG. 7A depicts the concentration of activated ⁸⁹Zr-CX-072 species detected in MDA-MB-231 tumor tissue and spleen by WES. FIG. 7B depicts an SDS-PAGE autoradiograph of ⁸⁹Zr-CX-072 and ⁸⁹Zr-PbCtrl in MC38 tumor lysates and plasma 6 days p.i. The results indicate that activated activatable antibody species is predominantly detected in tumor tissue. Intact (unactivated activatable antibody) tracer appeared to be present in both tumor and plasma.

[0185] Ex vivo autoradiography was conducted on the ⁸⁹Zr-CX-072 and ⁸⁹Zr-PbCtrl in MDA-MB-231 tumor tissue, in conjunction with PD-L1 immunofluorescence and PD-L1 immunohistochemistry (IHC). The results showed uptake of ⁸⁹Zr-CX-072 in PD-L1 expressing tumor tissue, and as a comparison, limited uptake of ⁸⁹Zr-PbCtrl in non-tumor tissue.

[0186] The data obtained from these experiments indicate that ⁸⁹Zr-CX-072 accumulates in tumor over time, but not in spleen, and that ⁸⁹Zr-CX-072 biodistribution in healthy tissues is similar to ⁸⁹Zr-PbCtrl. Therefore, ⁸⁹Zr-CX-072 tumor uptake appears to be PD-L1 specific, in contrast to spleen uptake. ⁸⁹Zr-CX-072 appeared to be preferentially activated in PDL-1-expressing tumor, but not in PDL-1 expressing spleen. It appeared that no PDL-1 mediated uptake of ⁸⁹Zr-CX-072 occurred in lymphoid tissues. Thus, the results obtained by in vivo PET imaging showing accumulation of the ⁸⁹Zr-CX-072 in tumor tissue were consistent with the results obtained from the ex vivo biodistribution studies, and therefore indicate that in vivo distribution of an activated binding polypeptide in a mammalian subject can be ascertained via PET imaging, as described herein.

### Example 2

### Conjugation of Activatable Antibody with Df-Suc-N-TFP and Radiolabelling with Zr⁸⁹

[0187] Conjugation with Df-Suc-N-TFP. The bifunctional chelator N-succinyldesferrioxamine-B-tetrafluorphenol (“desferal-N-suc-TFP” or “Df-suc-N-TFP”, ABX GmbH), which is the active tetrafluorophenol (TFP) ester of the succinylated form of desferal, was used to conjugate the succinylated form of desferal to the activatable antibody CX-072. For each conjugation, 60 mg of CX-072 was used. Before the start of the conjugation procedure, buffer exchange was performed on the CX-072 starting material using centrifugation with a 30 kDa filter (Vivaspin-2 Centrifugal Concentrator, Vivaproducts, Inc.). This step was performed two times until the buffer was partially replaced by water for injections and the desired volume of retentate was obtained. Next, conjugation was performed with the chelator Df-suc-N-TFP (7.5 mol/μl) at pH 8.5 and room temperature. The achieved desferal:activatable antibody ratio was determined by SE-HPLC. Subsequently, the protective iron (II) in the desferal moiety was removed with an excess of EDTA at pH 4.0-4.5. The intermediate Df-Suc-N-CX-072 was purified using centrifugation with a 30 kDa filter (Vivaspin-2), which was performed five times. The purified product was then diluted to a concentration of 10 mg/ml in Water for Injection (WFI), followed by sterile filtration. Df-Suc-N-CX-072 was stored at <−70° C. In each batch, 60 mg CX-072 was modified with Df-Suc-N-CX-072, and 25 mg aliquots made.

[0188] The conjugation process (up until the sterile filtration) was performed in a class A downflow cabinet in a class C background environment. The sterile filtration was performed in a closed glove-box (class) with a class B transfer chamber in a class C background environment. Environmental monitoring of the rooms was performed by continuous monitoring of the air pressure hierarchy and by measurement of microorganism and particulate levels.

[0189] Three independent 60 mg batches of Df-Suc-N-CX-072 were produced at yields of greater than 90%.

[0190] Df-Suc-N-CX-PbCtrl and Df-Suc-N-CX-075 were similarly prepared.

[0191] Radiolabeling of CX-072, PbCtrl CX-075. CX-072, PbCtrl and CX-075 (CytomX Therapeutics Inc.) were allowed to react with an 1:2 molar excess of TFP-N-sucDf (ABX GmbH) in accordance with the method for conjugating antibodies with ⁸⁹Zr described in Verel, et al., J. Nucl. Med. 44:1271-1281 (2003). CX-072-N-sucDf, PbCtrl-N-sucDf and CX-075-N-sucDf were purified using a Vivaspin-2 concentrator, aliquoted and stored at −80° C. Concentration and purity were determined by a Waters size exclusion high-performance liquid chromatography (SE-HPLC) system equipped with a dual-wavelength absorbance detector (280 nm versus 430 nm), in-line radioactivity detector and TSK-Gel SW column G3000SWXL 5 μm, 7.8 mm (Joint Analytical Systems; mobile phase: phosphate buffered saline (PBS; 9.0 mM sodium phosphate, 1.3 mM potassium phosphate, 140 mM sodium chloride, pH 7.2) (Hospital Pharmacy UMCG); flow: 0.7 mL/min).

[0192] Radiochemical purity was assessed by a trichloroacetic acid precipitation assay using methods described in Nagengast, et al., J. Nucl. Med. 48: 1313-1319 (2007).

### Example 3 cGMP Labeling of Df-Suc-N-CX-072 with Zirconium-89

[0193] Df-Suc-N-CX-072 aliquots were thawed and radiolabeled with a known volume and radioactive dose of clinical grade ⁸⁹Zr. The ⁸⁹Zr was obtained as a solution in 1 M oxalic acid (PerkinElmer Nederland B.V. in accordance with cGMP, activity between 740 and 1850 MBq/ml, with >99.9% radionuclide purity). The product was purified using centrifugation with a 30 kDa filter (Vivaspin-2) and the amount of radioactivity was determined in the filter, filtrate, and the retentate. The labeling process was performed in a closed Glove-box (class A) with a class B transfer chamber in a class C background environment. Environmental monitoring of the rooms was performed by continuous monitoring of the air pressure hierarchy and by measurement of microorganism and particulate levels. Three independent batches of ⁸⁹Zr-N-Suc-Df-CX-072 (each of batch size 2.5 mg/37 MBq) were prepared. The radiochemical purity pre-purification of the three batches was 97.0% or greater. The radiochemical purity post-purification of the three batches was greater than 99%. The yields were 51.63 MBq, 79.63 MBq, and 62.87 MBq.

### Example 4

### Stability Testing of ⁸⁹Zr-Activatable Binding Polypeptide

[0194] Three batches of GMP compliant CX-072-N-sucDf intermediate were produced and radiolabeled with ⁸⁹Zr as described above, followed by purification, dilution and sterile filtration. These batches were characterized on conjugation efficiency/ratio, yield, aggregates, concentration, pH, and radiochemical purity. The results are shown below in Table 3.

TABLE 3

| Test | Method | Batch 1 | Batch 2 | Batch3 |
|---|---|---|---|---|
| Appearance | Visual | Colorless | Colorless | Colorless |
| | Inspection | | | |
| Conjugation | SE-HPLC | 1.28 | 1.34. | 1.27 |
| Ratio | | | | |
| Purity - | SE-HPLC | 0.6% | 0.8% | 1.9% |
| Aggregates | at 280 nm | | | |
| Concentration | UV | 10.87 mg/ml | 9.32 mg/ml | 9.86 mg/ml |
| | spectrophotometry | | | |
| pH | European | 5.24 | 5.0 | 5.16 |
| | Pharmacopoeia | | | |
| Radiochemical | TCA | 99.5% | 99.0% | 99.2% |
| purity | Assay | | | |

[0195] The CX-072-N-sucDf intermediate was stored in sterile vials (Biopure) at −80° C. Stability of CX-072-N-sucDf batch 1 was analyzed at 0, 1, 3, 6 and 12 months after production. Data were analyzed for statistical significance in GraphPad Prism (v7.0) using the Mann-Whitney U test for non-parametric data followed by Bonferroni post-test correction for comparison of more than two groups. Immunoreactivity was analysed by nonlinear regression Log(agonist) vs. response in Graphpad Prism (v7.0). Experiments were performed at least three times. P values<0.05 were considered significant. The results are shown in Table XX below.

TABLE 4
Stability Testing after Radiolabeling with ⁸⁹Zr

| Test | t = 0 | t = 6 months | T = 12 months |
|---|---|---|---|
| Appearance | Colorless | Colorless | Colorless |
| Purity | ≤5% | ≤5% | ≤5% |
| Concentration | 10.87 mg/ml | | 10.25 mg/ml |
| pH | 5.24 | | 5.19 |
| Radiochemical | 99.5% | | 99.0% |
| purity | | | |

### Example 5

### Biodistribution of ⁸⁹Zr-Activatable Binding Polypeptide in a Human Subject

[0196] This is a study designed to evaluate the whole body distribution of ⁸⁹Zr-CX-072 in human subjects with locally advanced or metastatic solid tumors prior to treatment with standard CX-072.

[0197] The human subjects eligible for the studies are those having advanced or metastatic solid tumors and who have at least 1 tumor site that is accessible and safe to biopsy. Additional inclusion criteria include the following:
[0198] 1. PD-L1 status:
   [0199] At least 14 of 21 subjects have documented PD-L1 expression in 25% tumor cells by 22C3 PharmDx (DAKO) assay; and
   [0200] Up to 7 subjects with unknown PD-L1 status or documented PD-L1 negativity may be enrolled.
[0201] 2. Measurable disease, as defined by standard Response Evaluation Criteria in Solid Tumors (RECIST) v1.1. Metastatic lesion(s) (21 cm) of which a histological biopsy can safely be obtained according to standard clinical care procedures.
   Subjects who fulfill any of the following criteria will be excluded:

[0202] 1. Signs or symptoms of infection 2 weeks prior to ⁸⁹ZR-CX-072 injection.

[0203] 2. Ionizing radiation exposure in the last 12 months.

[0204] 3. Inability to comply with any additional requirement of the substudy protocol.

[0205] The study is divided into 2 parts. Part A is the dose-finding part of the substudy, performed to assess the optimal protein dose of CX-072 and the optimal interval between ⁸⁹Zr-CX-072 injection and scanning. A fixed dose of 37 MBq ⁸⁹Zr-CX-072 combined with an escalating dose of unlabeled CX-072 will be administered by IV infusion over 60 minutes for doses of 0.3, 1, 3, and 10 mg/kg. CX-072 will be supplied as a sterile, preservative-free solution in 100 mg vials at a concentration of 10 mg/mL and diluted to the following dose levels: 0.03 mg/kg; 0.1 mg/kg, 0.3 mg/kg. Unlabeled CX-072 will be administered by IV infusion followed by injection of the labeled ⁸⁹Zr-CX-072 dose. The cold dose is used to pre-block the non-specific antigen sinks, thus allowing for better imaging resolution. All infusions will be administered through a non-pyrogenic, low protein binding in-line filter (pore size of 0.2 μm). Following completion of the infusion, flush with an adequate amount of normal saline for infusion.

[0206] A maximum of 3 ⁸⁹Zr-CX-072-PET scans will be performed on Days 2 (48 [±6] h), 4 (96 [±6] h), and 7 (168 [±6] h) after ⁸⁹Zr-CX-072 administration. All scans will be obtained in total body mode (trajectory feet-skull vertex), using low-dose (LD) computed tomography (CT) for attenuation correction and localization purposes. For all PET scans, acquisition will comprise approximately 14 bed positions. The maximum total acquisition time, including LD-CT, will be approximately 90 minutes (approximately 50 minutes for PET scans post-injection on Days 2 and 4 and approximately 90 minutes for PET scans post-injection on Day 7). For ⁸⁹Zr-CX-072 imaging, the harmonization procedures, comparable to the European Association of Nuclear Medicine (EANM) Research Limited PET/CT accreditation and EANM guidelines, as described by Makris et al (Makris et al, 2014) will be applied. The imagine schedule is set forth in Table 5 below.

TABLE 5
Part A: Imaging Dose and Schedule Finding

| Part A | Day 0 | Day 2 | Day 4 | Day 7 | |
|---|---|---|---|---|---|
| ⁸⁹Zr-CX- | X | | | | Initiate standard |
| 072 | | | | | CX-072 treatment |
| ⁸⁹Zr-PET | X | X | X | X | |
| scan | | | | | |

After completion of Part A of the study, all subjects will receive standard CX-072 treatment.

[0207] The purpose of Part B is to evaluate the whole body distribution of ⁸⁹Zr-CX-072 in subjects with locally advanced or metastatic solid tumors. In Part B, subjects will undergo 1 PET scan according to the optimal scanning schedule determined in Part A. A maximum of 3 ⁸⁹Zr-CX-072-PET scans will be performed on Days 2 (48 [±6] h), 4 (96 [±6] h), and 7 (168 [±6]h) after ⁸⁹Zr-CX-072 administration.

[0208] Blood samples for PK will be drawn before ⁸⁹Zr-CX-072 injection (2×5 mL, 1×10 mL) and 60 (10) minutes (1×10 mL) after administration of the ⁸⁹Zr-CX-072 dose, and on Day 2 (T=48 [±6] hours), Day 4 (T=96 [±6] hours), and Day 7 (T=168 [±6] hours). If a PET scan is scheduled on the same day, blood sampling will be performed a maximum of 60 minutes before or after the PET scan procedure. The imaging schedule is set forth in Table 6, below

TABLE 6
Implementation of Imaging

| Part B | Day 0 | Day 2, 4, or 7 | |
|---|---|---|---|
| ⁸⁹Zr-CX- | X | | Initiate standard |
| 072 | | | CX-072 treatment |
| ⁸⁹Zr-PET | | X | |
| scan | | | |
| Biopsy | | X | |

[0209] Whole body ⁸⁹Zr-CX-072 distribution is determined by measuring the SUV on the ⁸⁹Zr-CX-072-PET scans. Quantification of ⁸⁹Zr-CX-072 distribution will be performed using AMIDE software (Stanford University, Palo Alto, Calif., USA). ⁸⁹Zr-CX-072 uptake will be corrected for body weight and injected dose and be quantitatively assessed as SUV, which is calculated using the formula: [tissue activity concentration (MBq/g)]/[(injected dose (MBq)/body weight (g)]. The SUV of all tumor lesions and relevant normal tissues will be calculated on all PET-CT scans. The in vivo PK of ⁸⁹Zr-CX-072 will be evaluated using summary statistics of SUV by organ and imaging time point.

[0210] Observations to Date:

[0211] The uptake of ⁸⁹Zr-CX-072 in tumor lesions was detected by PET imaging in multiple human patients.

TABLE 7
Table of Sequences

| SEQ | | |
|---|---|---|
| ID | | |
| NG: | NAME | SEQUENCE |
| 1 | CM | LSGRSDNH |
| 2 | CM | TGRGPSWV |
| 3 | CM | PLTGRSGG |
| 4 | CM | TARGPSFK |
| 5 | CM | NTLSGRSENHSG |
| 6 | CM | NTLSGRSGNHGS |
| 7 | CM | TSTSGRSANPRG |
| 8 | CM | TSGRSANP |
| 9 | CM | VHMPLGFLGP |
| 10 | CM | AVGLLAPP |
| 11 | CM | AQNLLGMV |
| 12 | CM | QNQALRMA |
| 13 | CM | LAAPLGLL |
| 14 | CM | STFPFGMF |
| 15 | CM | ISSGLLSS |
| 16 | CM | PAGLWLDP |
| 17 | CM | VAGRSMRP |
| 18 | CM | VVPEGRRS |
| 19 | CM | ILPRSPAF |
| 20 | CM | MVLGRSLL |
| 21 | CM | QGRAITFI |
| 22 | CM | SPRSIMLA |
| 23 | CM | SMLRSMPL |
| 24 | CM | ISSGLLSGRSDNH |
| 25 | CM | AVGLLAPPGGLSGRSDNH |
| 26 | CM | ISSGLSSGGSGGLSLSGRSDNH |
| 27 | CM | LSGRSGNH |
| 28 | CM | SGRSANPRG |
| 29 | CM | LSGRSDDH |
| 30 | CM | LSGRSDIH |
| 31 | CM | LSGRSDQH |
| 32 | CM | LSGRSDTH |
| 33 | CM | ISGRSDYH |
| 34 | CM | LSGRSDNP |
| 35 | CM | LSGRSANP |
| 36 | CM | LSGRSANI |
| 37 | CM | LSGRSDNI |
| 38 | CM | MIAPVAYR |
| 39 | CM | RPSPMWAY |
| 40 | CM | WATPRPMR |
| 41 | CM | FRLLDWQW |
| 42 | CM | ISSGL |
| 43 | CM | ISSGLLS |
| 44 | CM | ISSGLL |
| 45 | CM | ISSGLLSGRSANPRG |
| 46 | CM | AVGLLAPPTSGPSANPRG |
| 47 | CM | AVGLLAPPSGRSANPRG |
| 48 | CM | ISSGLLSGRSDDH |
| 49 | CM | ISSGLLSGRSDIH |
| 50 | CM | ISSGLLSGRSDQH |
| 51 | CM | ISSGLLSGRSDTH |
| 52 | CM | ISSGLLSGRSDYH |
| 53 | CM | ISSGLLSGRSDNP |
| 54 | CM | ISSGLLSGRSANP |
| 55 | CM | ISSGLLSGRSANI |
| 56 | CM | AVGLLAPPGGLSGRSDDH |
| 57 | CM | AVGLLAPPGGLSGRSDIH |
| 58 | CM | AVGLLAPPGGLSGRSDQH |
| 59 | CM | AVGLLAPPGGLSGRSDTH |
| 60 | CM | AVGLLAPPGGLSGRSDYH |
| 61 | CM | AVGLLAPPGGLSGRSDNP |
| 62 | CM | AVGLLAPPGGLSGRSANP |
| 63 | CM | AVGLLAPPGGLSGRSANI |
| 64 | CM | ISSGLLSGRSDNI |
| 65 | CM | AVGLLAPPGGLSGRSDNI |
| 66 | CM | GLSGRSDNHGGAVGLLAPP |
| 67 | CM | GLSGRSDNHGGVHMPLGFLGP |
| 68 | Linker | GSGGS |
| 69 | Linker | GGGS |
| 70 | Linker | GGSG |
| 71 | Linker | GGSGG |
| 72 | Linker | GSGSG |
| 73 | Linker | GSGGG |
| 74 | Linker | GGGSG |
| 75 | Linker | GSSSG |
| 76 | Linker | GSSGGSGGSGGSG |
| 77 | Linker | GSSGGSGGSGG |
| 78 | Linker | GSSGGSGGSGGS |
| 79 | Linker | GSSGGSGGSGGSGGGS |
| 80 | Linker | GSSGGSGGSG |
| 81 | Linker | GSSGGSGGSGS |
| 82 | Linker | GSSGT |
| 83 | Linker | GSSG |
| 84 | Mask | YCEVSELFVLPWCMG |
| | Moiety | |
| | PL01 | |
| 85 | Mask | SCLMHPHYAHDYCYV |
| | Moiety | |
| | PL02 | |
| 86 | Mask | LCEVLMLLQHPWCMG |
| | Moiety | |
| | PL03 | |
| 87 | Mask | IACRHFMEQLPFCHH |
| | Moiety | |
| | PL04 | |
| 88 | Mask | FGPRCGEASTCVPYE |
| | Moiety | |
| | PL05 | |
| 89 | Mask | ILYCDSWGAGCLTRP |
| | Moiety | |
| | PL06 | |
| 90 | Mask | GIALCPSHFCQLPQT |
| | Moiety | |
| | PL07 | |
| 91 | Mask | DGPRCFVSGECSPIG |
| | Moiety | |
| | PL08 | |
| 92 | Mask | LCYKLDYDDRSYCHI |
| | Moiety | |
| | PL09 | |
| 93 | Mask | PCHPHPYDARPYCNV |
| | Moiety | |
| | PL10 | |
| 94 | Mask | PCYWHPFFAYRYCNT |
| | Moiety | |
| | PL11 | |
| 95 | Mask | VCYYMMVLGRNWCSS |
| | Moiety | |
| | PL12 | |
| 96 | Mask | LCDLFKLREFPYCMG |
| | Moiety | |
| | PL13 | |
| 97 | Mask | YLPCHFVPIGACNNK |
| | Moiety | |
| | PL14 | |
| 98 | Mask | IFCHMGVVVPQCANY |
| | Moiety | |
| | PL15 | |
| 99 | Mask | ACHPHPYDARPYCNV |
| | Moiety | |
| | PL16 | |
| 100 | Mask | PCHPAPYDARPYCNV |
| | Moiety | |
| | PL17 | |
| 101 | Mask | PCHPHAYDARPYCNV |
| | Moiety | |
| | PL18 | |
| 102 | Mask | PCHPHPADARPYCNV |
| | Moiety | |
| | PL19 | |
| 103 | Mask | PCHPHPYAARPYCNV |
| | Moiety | |
| | PL20 | |
| 104 | Mask | PCHPHPYDAAPYCNV |
| | Moiety | |
| | PL21 | |
| 105 | Mask | PCHPHPYDARPACNV |
| | Moiety | |
| | PL22 | |
| 106 | Mask | PCHPHPYDARPYCAV |
| | Moiety | |
| | PL23 | |
| 107 | Mask | PCHAHPYDARPYCNV |
| | Moiety | |
| | PL24 | |
| 108 | Mask | PCHPHPYDARAYCNV |
| | Moiety | |
| | PL25 | |
| 109 | VL domain | GACATCCAGATGACCCAGTCTCCATCCTCCCTGTCTGC |
| | of anti- | ATCTGTAGGAGACAGAGTCACCATCACTTGCCGGGCA |
| | PDL1 | AGTCAGAGCATTAGCAGCTATTTAAATTGGTATCAGC |
| | activatable | AGAAACCAGGGAAAGCCCCTAAGCTCCTGATCTATTA |
| | antibody | TGCATCCACTTTGCAAAGTGGGGTCCCATCAAGGTTC |
| | | AGTGGCAGTGGATCTGGGACAGATTTCACTCTCACCA |
| | | TCAGCAGTCTGCAACCTGAAGATTTTGCAACTTACTA |
| | | CTGTCAACAGGATAATGGTTATCCTTCTACGTTCGGCC |
| | | AAGGGACCAAGGTGGAAATCAAACGG |
| 110 | VL domain | DIQMTQSPSSLSASVGDRVTITCRASQSISSYLNWYQQKP |
| | of anti- | GKAPKLLIYYASTLQSGVPSRFSGSGSGTDFTLTISSLQPE |
| | PDL1 | DFATYYCQQDNGYPSTFGQGTKVEIKR |
| | activatable | |
| | antibody | |
| 111 | VL domain | GATATTCAGATGACCCAGAGCCCGAGCAGCCTGAGCG |
| | of anti- | CGAGCGTGGGCGATCGCGTGACCATTACCTGCCGCGC |
| | PDL1 | GAGCCAGAGCATTAGCAGCTATCTGAACTGGTATCAG |
| | activatable | CAGAAACCGGGCAAAGCGCCGAAACTGCTGATTTATG |
| | antibody | CGGCGAGCAGCCTGCAGAGCGGCGTGCCGAGCCGCTT |
| | | TAGCGGCAGCGGCAGCGGCACCGATTTTACCCTGACC |
| | | ATTAGCAGCCTGCAGCCGGAAGATTTTGCGACCTATT |
| | | ATTGCCAGCAGGATAACGGCTATCCGAGCACCTTTGG |
| | | CGGCGGCACCAAAGTGGAAATTAAACGC |
| 112 | VL domain | DIQMTQSPSSLSASVGDRVTITCRASQSISSYLNWYQQKP |
| | of anti- | GKAPKLLIYAASSLQSGVPSRFSGSGSGTDFTLTISSLQPE |
| | PDL1 | DFATYYCQQDNGYPSTFGGGTKVEIKR |
| | activatable | |
| | antibody | |
| 113 | VH domain | GAGGTGCAGCTGTTGGAGTCTGGGGGAGGCTTGGTAC |
| | of anti- | AGCCTGGGGGGTCCCTGAGACTCTCCTGTGCAGCCTC |
| | PDL1 | TGGATTCACCTTTAGCAGCTATGCCATGAGCTGGGTC |
| | activatable | CGCCAGGCTCCAGGGAAGGGGCTGGAGTGGGTCTCA |
| | antibody | AGTATTTATTCTACTGGTGGTGCTACAGCTTACGCAGA |
| | | CTCCGTGAAGGGCCGGTTCACCATCTCCAGAGACAAT |
| | | TCCAAGAACACGCTGTATCTGCAAATGAACAGCCTGA |
| | | GAGCCGAGGACACGGCCGTATATTACTGTGCGAAATC |
| | | TTCTGCTGGTAGTCGGCCGGGTTTTGACTACTGGGGC |
| | | CAGGGAACCCTGGTCACCGTCTCGAGC |
| 114 | VH domain | EVQLLESGGGLVQPGGSLRLSCAASGFTFSSYAMSWVR |
| | of anti- | QAPGKGLEWVSSIYSTGGATAYADSVKGRFTISRDNSK |
| | PDL1 | NTLYLQMNSLRAEDTAVYYCAKSSAGQSRPGFDYWGQ |
| | activatable | GTLVTVSS |
| | antibody | |
| 115 | VH domain | GAGGTGCAGCTGTTGGAGTCTGGGGGAGGCTTGGTAC |
| | of anti- | AGCCTGGGGGGTCCCTGAGACTCTCCTGTGCAGCCTC |
| | PDL1 | TGGATTCACCTTTAGCAGCTATGCCATGAGCTGGGTC |
| | activatable | CGCCAGGCTCCAGGGAAGGGGCTGGAGTGGGTCTCA |
| | antibody | AGTATTTATTCTACTGGTGGTGCTACAGCTTACGCAGA |
| | | CTCCGTGAAGGGCCGGTTCACCATCTCCAGAGACAAT |
| | | TCCAAGAACACGCTGTATCTGCAAATGAACAGCCTGA |
| | | GAGCCGAGGACACGGCCGTATATTACTGTGCGAAATC |
| | | TTCTGCTGGTTCGTGGCCGGGTTTTGACTACTGGGGCC |
| | | AGGGAACCCTGGTCACCGTCTCGAGC |
| 116 | VH domain | EVQLLESGGGLVQPGGSLRLSCAASGFTFSSYAMSWVR |
| | of anti- | QAPGKGLEWVSSIYSTGGATAYADSVKGRFTISRDNSK |
| | PDL1 | NTLYLQMNSLRAEDTAVYYCAKSSAGQSWPGFDYWGQ |
| | activatable | GTLVTVSS |
| | antibody | |
| 117 | VH domain | GAGGTGCAGCTGTTGGAGTCTGGGGGAGGCTTGGTAC |
| | of anti- | AGCCTGGGGGGTCCCTGAGACTCTCCTGTGCAGCCTC |
| | PDL1 | TGGATTCACCTTTAGCAGCTATGCCATGAGCTGGGTC |
| | activatable | CGCCAGGCTCCAGGGAAGGGGCTGGAGTGGGTCTCA |
| | antibody | AGTATTTATTCTACTGGTGGTGCTACAGCTTACGCAGA |
| | | CTCCGTGAAGGGCCGGTTCACCATCTCCAGAGACAAT |
| | | TCCAAGAACACGCTGTATCTGCAAATGAACAGCCTGA |
| | | GAGCCGAGGACACGGCCGTATATTACTGTGCGAAATC |
| | | TTCTGCTGGTCAGTCGTTTCCGGGTTTTGACTACTGGG |
| | | GCCAGGGAACCCTGGTCACCGTCTCGAGC |
| 118 | VH domain | EVQLLESGGGLVQPGGSLRLSCAASGFTFSSYAMSWVR |
| | of anti- | QAPGKGLEWVSSIYSTGGATAYADSVKGRFTISRDNSK |
| | PDL1 | NTLYLQMNSLRAEDTAVYYCAKSSAGQSFPGFDYWGQ |
| | activatable | GTLVTVSS |
| | antibody | |
| 119 | VH domain | GAGGTGCAGCTGTTGGAGTCTGGGGGAGGCTTGGTAC |
| | of and- | AGCCTGGGGGGTCCCTGAGACTCTCCTGTGCAGCCTC |
| | PDL1 | TGGATTCACCTTTAGCAGCTATGCCATGAGCTGGGTC |
| | activatable | CGCCAGGCTCCAGGGAAGGGGCTGGAGTGGGTCTCA |
| | antibody | AGTATTTATTCTACTGGTGGTGCTACAGCTTACGCAGA |
| | | CTCCGTGAAGGGCCGGTTCACCATCTCCAGAGACAAT |
| | | TCCAAGAACACGCTGTATCTGCAAATGAACAGCCTGA |
| | | GAGCCGAGGACACGGCCGTATATTACTGTGCGAAATG |
| | | GTCTGCTGCTTTTGACTACTGGGGCCAGGGAACCCTG |
| | | GTCACCGTCTCGAGC |
| 120 | VH domain | EVQLLESGGGLVQPGGSLRLSCAASGFTFSSYAMSWVR |
| | of anti- | QAPGKGLEWVSSIYSTGGATAYADSVKGRFTISRDNSK |
| | PDL1 | NTLYLQMNSLRAEDTAVYYCAKWSAAFDYWGQGTLV |
| | activatable | TVSS |
| | antibody | |
| 121 | VH domain | GAGGTGCAGCTGTTGGAGTCTGGGGGAGGCTTGGTAC |
| | of anti- | AGCCTGGGGGGTCCCTGAGACTCTCCTGTGCAGCCTC |
| | PDL1 | TGGATTCACCTTTAGCAGCTATGCCATGAGCTGGGTC |
| | activatable | CGCCAGGCTCCAGGGAAGGGGCTGGAGTGGGTCTCA |
| | antibody | AGTATTTATTCTACTGGTGGTGCTACAGCTTACGCAGA |
| | | CTCCGTGAAGGGCCGGTTCACCATCTCCAGAGACAAT |
| | | TCCAAGAACACGCTGTATCTGCAAATGAACAGCCTGA |
| | | GAGCCGAGGACACGGCCGTATATTACTGTGCGAAATG |
| | | GTCTGCTGCTTTTGACTACTGGGGCCAGGGAACCCTG |
| | | GTCACCGTCTCGAGC |
| 122 | VH domain | EVQLLESGGGLVQPGGSLRLSCAASGFTFSSYAMSWVR |
| | of anti- | QAPGKGLEWVSSIYSTGGATAYADSVKGRFTISRDNSK |
| | PDL1 | NTLYLQMNSLRAEDTAVYYCAKWSAGYDYWGQGTLV |
| | activatable | TVSS |
| | antibody | |
| 123 | VH domain | GAGGTGCAGCTGTTGGAGTCTGGGGGAGGCTTGGTAC |
| | of anti- | AGCCTGGGGGGTCCCTGAGACTCTCCTGTGCAGCCTC |
| | PDL1 | TGGATTCACCTTTAGCAGCTATGCCATGAGCTGGGTC |
| | activatable | CGCCAGGCTCCAGGGAAGGGGCTGGAGTGGGTCTCA |
| | antibody | AGTATTTATTCTACTGGTGGTGCTACAGCTTACGCAGA |
| | | CTCCGTGAAGGGCCGGTTCACCATCTCCAGAGACAAT |
| | | TCCAAGAACACGCTGTATCTGCAAATGAACAGCCTGA |
| | | GAGCCGAGGACACGGCCGTATATTACTGTGCGAAATG |
| | | GTCTAAGGGTTTTGACTACTGGGGCCAGGGAACCCTG |
| | | GTCACCGTCTCGAGC |
| 124 | VH domain | EVQLLESGGGLVQPGGSLRLSCAASGFTFSSYAMSWVR |
| | of anti- | QAPGKGLEWVSSIYSTGGATAYADSVKGRFTISRDNSK |
| | PDL1 | NTLYLQMNSLRAEDTAVYYCAKWSKGFDYWGQGTLV |
| | activatable | TVSS |
| | antibody | |
| 125 | VH domain | GAGGTGCAGCTGTTGGAGTCTGGGGGAGGCTTGGTAC |
| | of anti- | AGCCTGGGGGGTCCCTGAGACTCTCCTGTGCAGCCTC |
| | PDL1 | TGGATTCACCTTTAGCAGCTATGCCATGAGCTGGGTC |
| | activatable | CGCCAGGCTCCAGGGAAGGGGCTGGAGTGGGTCTCA |
| | antibody | AGTATTTGGAAGTAGGGTATTGTGACAGTGAGCTTAC |
| | | GCAGACTCCGTGAAGGGCCGGTTCACCATCTCCAGAG |
| | | ACAATTCCAAGAACACGCTGTATCTGCAAATGAACAG |
| | | CCTGAGAGCCGAGGACACGGCCGTATATTACTGTGCG |
| | | AAATCTTCTGCTGGTTTTGACTACTGGGGCCAGGGAA |
| | | CCCTGGTCACCGTCTCGAGC |
| 126 | VH domain | EVQLLESGGGLVQPGGSLRLSCAASGFTFSSYAMSWVR |
| | of anti- | QAPGKGLEWVSSIWKQGIVTVYDSVKGRFTISRDNSKN |
| | PDL1 | TLYLQMNSLRAEDTAVYYCAKSSAGFDYWGQGTLVTV |
| | activatable | |
| | antibody | |
| 127 | VH domain | GAGGTGCAGCTGTTGGAGTCTGGGGGAGGCTTGGTAC |
| | of anti- | AGCCTGGGGGGTCCCTGAGACTCTCCTGTGCAGCCTC |
| | PDL1 | TGGATTCACCTTTAGCAGCTATGCCATGAGCTGGGTC |
| | activatable | CGCCAGGCTCCAGGGAAGGGGCTGGAGTGGGTCTCA |
| | antibody | AGTATTTGGCGGAATGGTATTGTTACAGTTAGCTTAC |
| | | GCAGACTCCGTGAAGGGCCGGTTCACCATCTCCAGAG |
| | | ACAATTCCAAGAACACGCTGTATCTGCAAATGAACAG |
| | | CCTGAGAGCCGAGGACACGGCCGTATATTACTGTGCG |
| | | AAATCTTCTGCTGGTTTTGACTACTGGGGCCAGGGAA |
| | | CCCTGGTCACCGTCTCGAGC |
| 128 | VH domain | EVQLLESGGGLVQPGGSLRLSCAASGFTFSSYAMSWVR |
| | of anti- | QAPGKGLEWVSSIWRNGIVTVYDSVKGRFTISRDNSKNT |
| | PDL1 | LYLQMNSLRAEDTAVYYCAKSSAGFDYWGQGTLVTVS |
| | activatable | S |
| | antibody | |
| 129 | VH domain | GAGGTGCAGCTGTTGGAGTCTGGGGGAGGCTTGGTAC |
| | of anti- | AGCCTGGGGGGTCCCTGAGACTCTCCTGTGCAGCCTC |
| | PDL1 | TGGATTCACCTTTAGCAGCTATGCCATGAGCTGGGTC |
| | activatable | CGCCAGGCTCCAGGGAAGGGGCTGGAGTGGGTCTCA |
| | antibody | GATATTTGGAAGTAGGGTATGGTTACAGTGAGCTTAC |
| | | GCAGACTCCGTGAAGGGCCGGTTCACCATCTCCAGAG |
| | | ACAATTCCAAGAACACGCTGTATCTGCAAATGAACAG |
| | | CCTGAGAGCCGAGGACACGGCCGTATATTACTGTGCG |
| | | AAATCTTCTGCTGGTTTTGACTACTGGGGCCAGGGAA |
| | | CCCTGGTCACCGTCTCGAGC |
| 130 | VH domain | EVQLLESGGGLVQPGGSLRLSCAASGFTFSSYAMSWVR |
| | of anti- | QAPGKGLEWVSDIWKQGMVTVYDSVKGRFTISRDNSK |
| | PDL1 | NTLYLQMNSLRAEDTAVYYCAKSSAGFDYWGQGTLVT |
| | activatable | VSS |
| | antibody | |
| 131 | VH domain | GAGGTGCAGCTGTTGGAGTCTGGGGGAGGCTTGGTAC |
| | of anti- | AGCCTGGGGGGTCCCTGAGACTCTCCTGTGCAGCCTC |
| | PDL1 | TGGATTCACCTTTAGCAGCTATGCCATGAGCTGGGTC |
| | activatable | CGCCAGGCTCCAGGGAAGGGGCTGGAGTGGGTCTCAT |
| | antibody | CGATTTGGAGGTAGGGTCTGGCGACAGCGAGCTTACG |
| | | CAGACTCCGTGAAGGGCCGGTTCACCATCTCCAGAGA |
| | | CAATTCCAAGAACACGCTGTATCTGCAAATGAACAGC |
| | | CTGAGAGCCGAGGACACGGCCGTATATTACTGTGCGA |
| | | AATCTTCTGCTGGTTTTGACTACTGGGGCCAGGGAAC |
| | | CCTGGTCACCGTCTCGAGC |
| 132 | VH domain | EVQLLESGGGLVQPGGSLRLSCAASGFTFSSYAMSWVR |
| | of anti- | QAPGKGLEWVSSIWRQGLATAYDSVKGRFTISRDNSKN |
| | PDL1 | TLYLQMNSLRAEDTAVYYCAKSSAGFDYWGQGTLVTV |
| | activatable | SS |
| | antibody | |
| 133 | VH domain | GAGGTGCAGCTGTTGGAGTCTGGGGGAGGCTTGGTAC |
| | of anti- | AGCCTGGGGGGTCCCTGAGACTCTCCTGTGCAGCCTC |
| | PDL1 | TGGATTCACCTTTAGCAGCTATGCCATGAGCTGGGTC |
| | activatable | CGCCAGGCTCCAGGGAAGGGGCTGGAGTGGGTCTCA |
| | antibody | GAGATTGTGGCTACTGGTATTTTGACAAGTAGCTTAC |
| | | GCAGACTCCGTGAAGGGCCGGTTCACCATCTCCAGAG |
| | | ACAATTCCAAGAACACGCTGTATCTGCAAATGAACAG |
| | | CCTGAGAGCCGAGGACACGGCCGTATATTACTGTGCG |
| | | AAATCTTCTGCTGGTTTTGACTACTGGGGCCAGGGAA |
| | | CCCTGGTCACCGTCTCGAGC |
| 134 | VH domain | EVQLLESGGGLVQPGGSLRLSCAASGFTFSSYAMSWVR |
| | of anti- | QAPGKGLEWVSEIVATGILTSYDSVKGRFTISRDNSKNT |
| | PDL1 | LYLQMNSLRAEDTAVYYCAKSSAGFDYWGQGTLVTVS |
| | activatable | S |
| | antibody | |
| 135 | VH domain | GAGGTGCAGCTGTTGGAGTCTGGGGGAGGCTTGGTAC |
| | of anti- | AGCCTGGGGGGTCCCTGAGACTCTCCTGTGCAGCCTC |
| | PDL1 | TGGATTCACCTTTAGCAGCTATGCCATGAGCTGGGTC |
| | activatab1e | CGCCAGGCTCCAGGGAAGGGGCTGGAGTGGGTCTCAT |
| | antibody | CGATTGGTCGGTAGGGTTTGATTACAGTTAGCTTACG |
| | | CAGACTCCGTGAAGGGCCGGTTCACCATCTCCAGAGA |
| | | CAATTCCAAGAACACGCTGTATCTGCAAATGAACAGC |
| | | CTGAGAGCCGAGGACACGGCCGTATATTACTGTGCGA |
| | | AATCTTCTGCTGGTTTTGACTACTGGGGCCAGGGAAC |
| | | CCTGGTCACCGTCTCGAGC |
| 136 | VH domain | EVQLLESGGGLVQPGGSLRLSCAASGFTFSSYAMSWVR |
| | of anti- | QAPGKGLEWVSSIGRQGLITVYDSVKGRFTISRDNSKNT |
| | PDL1 | LYLQMNSLRAEDTAVYYCAKSSAGFDYWGQGTLVTVS |
| | activatable | S |
| | antibody | |
| 137 | VH domain | GAGGTGCAGCTGTTGGAGTCTGGGGGAGGCTTGGTAC |
| | of anti- | AGCCTGGGGGGTCCCTGAGACTCTCCTGTGCAGCCTC |
| | PDL1 | TGGATTCACCTTTAGCAGCTATGCCATGAGCTGGGTC |
| | activatable | CGCCAGGCTCCAGGGAAGGGGCTGGAGTGGGTCTCAT |
| | antibody | CTATTTGGTATTAGGGTCTGGTGACAGTTAGCTTACGC |
| | | AGACTCCGTGAAGGGCCGGTTCACCATCTCCAGAGAC |
| | | AATTCCAAGAACACGCTGTATCTGCAAATGAACAGCC |
| | | TGAGAGCCGAGGACACGGCCGTATATTACTGTGCGAA |
| | | ATCTTCTGCTGGTTTTGACTACTGGGGCCAGGGAACC |
| | | CTGGTCACCGTCTCGAGC |
| 138 | VH domain | EVQLLESGGGLVQPGGSLRLSCAASGFTFSSYAMSWVR |
| | of anti- | QAPGKGLEWVSSIWYQGLVTVYDSVKGRFTISRDNSKN |
| | PDL1 | TLYLQMNSLRAEDTAVYYCAKSSAGFDYWGQGTLVTV |
| | activatab1e | SS |
| | antibody | |
| 139 | VH domain | GAGGTGCAGCTGTTGGAGTCTGGGGGAGGCTTGGTAC |
| | of anti- | AGCCTGGGGGGTCCCTGAGACTCTCCTGTGCAGCCTC |
| | PDL1 | TGGATTCACCTTTAGCAGCTATGCCATGAGCTGGGTC |
| | activatable | CGCCAGGCTCCAGGGAAGGGGCTGGAGTGGGTCTCA |
| | antibody | GATATTTGGAAGTAGGGTTTTGCTACAGCGAGCTTAC |
| | | GCAGACTCCGTGAAGGGCCGGTTCACCATCTCCAGAG |
| | | ACAATTCCAAGAACACGCTGTATCTGCAAATGAACAG |
| | | CCTGAGAGCCGAGGACACGGCCGTATATTACTGTGCG |
| | | AAATCTTCTGCTGGTTTTGACTACTGGGGCCAGGGAA |
| | | CCCTGGTCACCGTCTCGAGC |
| 140 | VH domain | EVQLLESGGGLVQPGGSLRLSCAASGFTFSSYAMSWVR |
| | of anti- | QAPGKGLEWVSDIWKQGFATADSVKGRFTISRDNSKNT |
| | PDL1 | LYLQMNSLRAEDTAVYYCAKSSAGFDYWGQGTLVTVS |
| | activatable | S |
| | antibody | |
| 141 | VH domain | GAGGTGCAGCTGTTGGAGTCTGGGGGAGGCTTGGTAC |
| | of anti- | AGCCTGGGGGGTCCCTGAGACTCTCCTGTGCAGCCTC |
| | PDL1 | TGGATTCACCTTTAGCAGCTATGCCATGAGCTGGGTC |
| | activatable | CGCCAGGCTCCAGGGAAGGGGCTGGAGTGGGTCTCA |
| | antibody | AGTATTTGGAAGTAGGGTATTGTGACAGTGAGCTTAC |
| | | GCAGACTCCGTGAAGGGCCGGTTCACCATCTCCAGAG |
| | | ACAATTCCAAGAACACGCTGTATCTGCAAATGAACAG |
| | | CCTGAGAGCCGAGGACACGGCCGTATATTACTGTGCG |
| | | AAATCTTCTGCTGGTTTTGACTACTGGGGCCAGGGAA |
| | | CCCTGGTCACCGTCTCGAGC |
| 142 | VH domain | EVQLLESGGGLVQPGGSLRLSCAASGFTFSSYAMSWVR |
| | of anti- | QAPGKGLEWVSSIWKQGIVTVYDSVKGRFTTSRDNSKN |
| | PDL1 | TLYLQMNSLRAEDTAVYYCAKSSAGFDYWGQGTLVTV |
| | activatable | SS |
| | antibody | |
| 143 | VH domain | GAGGTGCAGCTGTTGGAGTCTGGGGGAGGCTTGGTAC |
| | of anti- | AGCCTGGGGGGTCCCTGAGACTCTCCTGTGCAGCCTC |
| | PDL1 | TGGATTCACCTTTAGCAGCTATGCCATGAGCTGGGTC |
| | activatable | CGCCAGGCTCCAGGGAAGGGGCTGGAGTGGGTCTCAT |
| | antibody | CGATTTGGAGGTAGGGTCTGGCGACAGCGAGCTTACG |
| | | CAGACTCCGTGAAGGGCCGGTTCACCATCTCCAGAGA |
| | | CAATTCCAAGAACACGCTGTATCTGCAAATGAACAGC |
| | | CTGAGAGCCGAGGACACGGCCGTATATTACTGTGCGA |
| | | AATCTTCTGCTGGTTTTGACTACTGGGGCCAGGGAAC |
| | | CCTGGTCACCGTCTCGAGC |
| 144 | VH domain | EVQLLESGGGLVQPGGSLRLSCAASGFTFSSYAMSWVR |
| | of anti- | QAPGKGLEWVSSIWRQGLATAYDSVKGRFTISRDNSKN |
| | PDL1 | TLYLQMNSLRAEDTAVYYCAKSSAGFDYWGQGTLVTV |
| | activatable | SS |
| | antibody | |
| 145 | VH domain | GAGGTGCAGCTGTTGGAGTCTGGGGGAGGCTTGGTAC |
| | of anti- | AGCCTGGGGGGTCCCTGAGACTCTCCTGTGCAGCCTC |
| | PDL1 | TGGATTCACCTTTAGCAGCTATGCCATGAGCTGGGTC |
| | activatab1e | CGCCAGGCTCCAGGGAAGGGGCTGGAGTGGGTCTCA |
| | antibody | AGTATTTGGCGGAATGGTATTGTTACAGTTTACGCAG |
| | | ACTCCGTGAAGGGCCGGTTCACCATCTCCAGAGACAA |
| | | TTCCAAGAACACGCTGTATCTGCAAATGAACAGCCTG |
| | | AGAGCCGAGGACACGGCCGTATATTACTGTGCGAAAT |
| | | GGTCTGCTGCTTTTGACTACTGGGGCCAGGGAACCCT |
| | | GGTCACCGTCTCGAGC |
| 146 | VH domain | EVQLLESGGGLVQPGGSLRLSCAASGFTFSSYAMSWVR |
| | of anti- | QAPGKGLEWVSSIWRNGIVTVYADSVKGRFTISRDNSK |
| | PDL1 | NTLYLQMNSLRAEDTAVYYCAKWSAAFDYWGQGTLV |
| | activatable | TVSS |
| | antibody | |
| 147 | VH domain | GAGGTGCAGCTGTTGGAGTCTGGGGGAGGCTTGGTAC |
| | of anti- | AGCCTGGGGGGTCCCTGAGACTCTCCTGTGCAGCCTC |
| | PDL1 | TGGATTCACCTTTAGCAGCTATGCCATGAGCTGGGTC |
| | activatable | CGCCAGGCTCCAGGGAAGGGGCTGGAGTGGGTCTCA |
| | antibody | AGTATTTGGCGGAATGGTATTGTTACAGTTTACGCAG |
| | | ACTCCGTGAAGGGCCGGTTCACCATCTCCAGAGACAA |
| | | TTCCAAGAACACGCTGTATCTGCAAATGAACAGCCTG |
| | | AGAGCCGAGGACACGGCCGTATATTACTGTGCGAAAT |
| | | GGTCTGCTGGTTATGACTACTGGGGCCAGGGAACCCT |
| | | GGTCACCGTCTCGAGC |
| 148 | VH domain | EVQLLESGGGLVQPGGSLRLSCAASGFTFSSYAMSWVR |
| | of anti- | QAPGKGLEWVSSIWRNGIVTVYADSVKGRFTISRDNSK |
| | PDL1 | NTLYLQMNSLRAEDTAVYYCAKWSAGYDYWGQGTLV |
| | activatable | TVSS |
| | antibody | |
| 149 | VH domain | GAGGTGCAGCTGTTGGAGTCTGGGGGAGGCTTGGTAC |
| | of anti- | AGCCTGGGGGGTCCCTGAGACTCTCCTGTGCAGCCTC |
| | PDL1 | TGGATTCACCTTTAGCAGCTATGCCATGAGCTGGGTC |
| | activatable | CGCCAGGCTCCAGGGAAGGGGCTGGAGTGGGTCTCA |
| | antibody | AGTATTTGGCGGAATGGTATTGTTACAGTTTACGCAG |
| | | ACTCCGTGAAGGGCCGGTTCACCATCTCCAGAGACAA |
| | | TTCCAAGAACACGCTGTATCTGCAAATGAACAGCCTG |
| | | AGAGCCGAGGACACGGCCGTATATTACTGTGCGAAAT |
| | | GGTCTAAGGGTTTTGACTACTGGGGCCAGGGAACCCT |
| | | GGTCACCGTCTCGAGC |
| 150 | VH domain | EVQLLESGGGLVQPGGSLRLSCAASGFTFSSYAMSWVR |
| | of anti- | QAPGKGLEWVSSIWRNGIVTVYADSVKGRFTISRDNSK |
| | PDL1 | NTLYLQMNSLRAEDTAVYYCAKWSKGFDYWGQGTLV |
| | activatable | TVSS |
| | antibody | |
| 151 | VH domain | GAGGTGCAGCTGTTGGAGTCTGGGGGAGGCTTGGTAC |
| | of anti- | AGCCTGGGGGGTCCCTGAGACTCTCCTGTGCAGCCTC |
| | PDL1 | TGGATTCACCTTAGCAGCTATGCCATGAGCTGGGTC |
| | activatable | CGCCAGGCTCCAGGGAAGGGGCTGGAGTGGGTCTCAT |
| | antibody | CTATTTGGTATCAGGGTCTGGTGACAGTTTACGCAGA |
| | | CTCCGTGAAGGGCCGGTTCACCATCTCCAGAGACAAT |
| | | TCCAAGAACACGCTGTATCTGCAAATGAACAGCCTGA |
| | | GAGCCGAGGACACGGCCGTATATTACTGTGCGAAATG |
| | | GTCTGCTGCTTTTGACTACTGGGGCCAGGGAACCCTG |
| | | GTCACCGTCTCGAGC |
| 152 | VH domain | EVQLLESGGGLVQPGGSLRLSCAASGFTFSSYAMetSWV |
| | of anti- | RQAPGKGLEWVSSIWYQGLVTVYADSVKGRFTISRDNS |
| | PDL1 | KNTLYLQMetNSLRAEDTAVYYCAKWSAAFDYWGQGT |
| | activatable | LVTVSS |
| | antibody | |
| 153 | VH domain | GAGGTGCAGCTGTTGGAGTCTGGGGGAGGCTTGGTAC |
| | of anti- | AGCCTGGGGGGTCCCTGAGACTCTCCTGTGCAGCCTC |
| | PDL1 | TGGATTCACCTTTAGCAGCTATGCCATGAGCTGGGTC |
| | activatable | CGCCAGGCTCCAGGGAAGGGGCTGGAGTGGGTCTCA |
| | antibody | AGTATTTGGCGGAATGGTATTGTTACAGTTTACGCAG |
| | | ACTCCGTGAAGGGCCGGTTCACCATCTCCAGAGACAA |
| | | TTCCAAGAACACGCTGTATCTGCAAATGAACAGCCTG |
| | | AGAGCCGAGGACACGGCCGTATATTACTGTGCGAAAT |
| | | GGTCTGCTGGTTATGACTACTGGGGCCAGGGAACCCT |
| | | GGTCACCGTCTCGAGC |
| 154 | VH domain | EVQLLESGGGLVQPGGSLRLSCAASGFTFSSYAMSWVR |
| | of anti- | QAPGKGLEWVSSIWYQGLVTVYADSVKGRFTISRDNSK |
| | PDL1 | NTLYLQMNSLRAEDTAVYYCAKWSAGYDYWGQGTLV |
| | activatable | TVSS |
| | antibody | |
| 155 | VH domain | GAGGTGCAGCTGTTGGAGTCTGGGGGAGGCTTGGTAC |
| | of anti- | AGCCTGGGGGGTCCCTGAGACTCTCCTGTGCAGCCTC |
| | PDL1 | TGGATTCACCTTTAGCAGCTATGCCATGAGCTGGGTC |
| | activatable | CGCCAGGCTCCAGGGAAGGGGCTGGAGTGGGTCTCA |
| | antibody | AGTATTTGGCGGAATGGTATTGTTACAGTTTACGCAG |
| | | ACTCCGTGAAGGGCCGGTTCACCATCTCCAGAGACAA |
| | | TTCCAAGAACACGCTGTATCTGCAAATGAACAGCCTG |
| | | AGAGCCGAGGACACGGCCGTATATTACTGTGCGAAAT |
| | | GGTCTAAGGGTTTTGACTACTGGGGCCAGGGAACCCT |
| | | GGTCACCGTCTCGAGC |
| 156 | VH domain | EVQLLESGGGLVQPGGSLRLSCAASGFTFSSYAMSWVR |
| | of anti- | QAPGKGLEWVSSIWYQGLVTVYADSVKGRFTISRDNSK |
| | PDL1 | NTLYLQMNSLRAEDTAVYYCAKWSKGFDYWGQGTLV |
| | activatable | TVSS |
| | antibody | |
| 157 | Spacer | QGQSGS |
| 158 | Spacer | GQSGS |
| 159 | Spacer | QSGS |
| 160 | Spacer | QGQSGQG |
| 161 | Spacer | GQSGQG |
| 162 | Spacer | QSGQG |
| 163 | Spacer | SGQG |
| 164 | Spacer | QGQSGQ |
| 165 | Spacer | GQSGQ |
| 166 | Spacer | QSGQ |
| 167 | CX-072 | CAGGGCCAGTCCGGCTCATATCTGCCCTGCCACTTCG |
| | light chain | TGCCAATCGGGGCCTGTACAATAAGGGCGGTGGATC |
| | with spacer | TAGTGGTGGCTCAGGCGGGTCTGGCGGCATTTCCAGT |
| | | GGACTCTTGTCAGGACGATCCGATAATCATGGCGGGT |
| | | CCGACATCCAGATGACACAGAGCCCTTCTTCCCTCTC |
| | | CGCAAGCGTTGGCGACAGGGTCACCATTACCTGTAGG |
| | | GCTTCTCAGAGCATCTCAAGCTATCTGAACTGGTACC |
| | | AGCAGAAACCTGGAAAGGCTCCAAAACTGCTGATTTA |
| | | CGCTGCCTCCAGTCTTCAGTCAGGCGTCCCCTCCAGAT |
| | | TTAGCGGATCAGGTAGTGGAACTGATTTTACCCTTAC |
| | | AATATCTTCTCTGCAGCCAGAGGACTTCGCCACATAC |
| | | TATTGTCAGCAAGACAATGGTTACCCCAGTACATTTG |
| | | GCGGAGGGACAAAGGTCGAGATCAAAAGGACCGTAG |
| | | CAGCACCAAGCGTCTTTATTTTCCCCCCCAGTGACGA |
| | | ACAGCTGAAGAGCGGAACAGCTTCAGTGGTGTGTCTC |
| | | CTGAATAACTTCTATCCACGCGAGGCAAAGGTGCAGT |
| | | GGAAGGTGGACAATGCACTGCAGTCTGGTAATTCCCA |
| | | AGAAAGTGTTACTGAGCAGGATTCCAAGGATTCAACT |
| | | TACTCTCTGTCTAGCACCCTGACTCTTTCTAAAGCAGA |
| | | TTATGAGAAGCATAAGGTCTACGCTTGCGAGGTGACC |
| | | CACCAGGGGCTTTCCTCTCCAGTTACCAAGTCATTCA |
| | | ACCGGGGTGAGTGTTGATGAGAATTC |
| 168 | Light chain | QGQSGSGIALCPSHFCQLPQTGGGSSGGSGGSGGISSGLL |
| | with spacer | SGRSDNHGGSDIQMTQSPSSLSASVGDRVTITCRASQSIS |
| | | SYLNWYQQKPGKAPKLLIYAASSLQSGVPSRFSGSGSGT |
| | | DFTLTISSLQPEDFATYYCQQDNGYPSTFGGGTKVEIKRT |
| | | VAAPSVFIFPPSDEQLKSGTASVVCLLNNFYPREAKVQW |
| | | KVDNALQSGNSQESVTEQDSKDSTYSLSSTLTLSKADYE |
| | | KHKVYACEVTHQGLSSPVTKSFNRGEC |
| 169 | Light chain | TATCTGCCCTGCCACTTCGTGCCAATCGGGGCCTGTA |
| | without | ACAATAAGGGCGGTGGATCTAGTGGTGGCTCAGGCG |
| | spacer | GGTCTGGCGGCATTTCCAGTGGACTCTTGTCAGGACG |
| | | ATCCGATAATCATGGCGGGTCCGACATCCAGATGACA |
| | | CAGAGCCCTTCTTCCCTCTCCGCAAGCGTTGGCGACA |
| | | GGGTCACCATTACCTGTAGGGCTTCTCAGAGCATCTC |
| | | AAGCTATCTGAACTGGTACCAGCAGAAACCTGGAAA |
| | | GGCTCCAAAACTGCTGATTTACGCTGCCTCCAGTCTTC |
| | | AGTCAGGCGTCCCCTCCAGATTTAGCGGATCAGGTAG |
| | | TGGAACTGATTTTACCCTTACAATATCTTCTCTGCAGC |
| | | CAGAGGACTTCGCCACATACTATTGTCAGCAAGACAA |
| | | TGGTTACCCCAGTACATTTGGCGGAGGGACAAAGGTC |
| | | GAGATCAAAAGGACCGTAGCAGCACCAAGCGTCTTTA |
| | | TTTTCCCCCCCAGTGACGAACAGCTGAAGAGCGGAAC |
| | | AGCTTCAGTGGTGTGTCTCCTGAATAACTTCTATCCAC |
| | | GCGAGGCAAAGGTGCAGTGGAAGGTGGACAATGCAC |
| | | TGCAGTCTGGTAATTCCCAAGAAAGTGTTACTGAGCA |
| | | GGATTCCAAGGATTCAACTTACTCTCTGTCTAGCACCC |
| | | TGACTCTTTCTAAAGCAGATTATGAGAAGCATAAGGT |
| | | CTACGCTTGCGAGGTGACCCACCAGGGGCTTTCCTCT |
| | | CCAGTTACCAAGTCATTCAACCGGGGTGAGTGTTGAT |
| | | GAGAATTC |
| 170 | Light chain | GIALCPSHFCQLPQTGGGSSGGSGGSGGISSGLLSGRSDN |
| | without | HGGSDIQMTQSPSSLSASVGDRVTITCRASQSISSYLNWY |
| | spacer | QQKPGKAPKLLIYAASSLQSGVPSRFSGSGSGTDFTLTIS |
| | | SLQPEDFATYYCQQDNGYPSTFGGGTKVEIKRTVAAPSV |
| | | FIFPPSDEQLKSGTASVVCLLNNFYPREAKVQWKVDNA |
| | | LQSGNSQESVTEQDSKDSTYSLSSTLTLSKADYEKHKVY |
| | | ACEVTHQGLSSPVTKSFNRGEC |
| 171 | Heavy chain | GAAGTGCAGCTGCTCGAAAGCGGCGGAGGCTTGGTG |
| | | CAGCCAGGAGGGAGCCTGCGACTGTCTTGCGCAGCCA |
| | | GCGGATTCACTTTCTCTTCCTATGCCATGAGCTGGGTT |
| | | CGACAGGCACCCGGCAAAGGTCTCGAGTGGGTGTCTA |
| | | GCATCTGGCGAAACGGAATAGTTACAGTGTATGCCGA |
| | | TAGCGTGAAGGGTCGCTTTACTATTTCACGGGATAAT |
| | | TCTAAGAACACCCTCTACCTGCAAATGAATAGCCTTA |
| | | GGGCAGAAGATACCGCCGTGTACTACTGTGCCAAATG |
| | | GTCCGCAGCCTTTGACTACTGGGGCCAGGGGACACTG |
| | | GTGACCGTGTCCTCTGCATCAACCAAGGGGCCATCAG |
| | | TGTTCCCACTCGCCCCATGTAGCAGATCAACATCTGA |
| | | ATCCACCGCAGCCCTTGGCTGCCTTGTTAAGGACTATT |
| | | TCCCAGAACCCGTGACCGTAAGTTGGAACTCTGGCGC |
| | | CCTTACTTCTGGGGTGCACACCTTCCCAGCAGTGTTGC |
| | | AGTCCAGTGGCCTTTACTCTCTGTCTAGTGTAGTGACT |
| | | GTGCCTTCCTCTAGTCTCGGTACCAAGACCTATACCTG |
| | | CAACGTAGATCATAAGCCCAGCAATACAAAGGTTGAT |
| | | AAGAGAGTAGAGTCAAAGTACGGCCCACCCTGCCCA |
| | | CCTTGTCCAGCTCCCGAGTTCCTGGGCGGACCCTCAG |
| | | TCTTTCTCTTCCCACCTAAACCCAAGGATACCCTTATG |
| | | ATCTCCAGGACTCCTGAGGTGACCTGCGTTGTGGTCG |
| | | ACGTGTCACAAGAGGACCCTGAGGTACAGTTTAACTG |
| | | GTACGTGGACGGTGTGGAGGTACATAACGCTAAGACT |
| | | AAGCCACGAGAGGAGCAATTTAACTCCACTTACAGGG |
| | | TGGTCAGCGTCCTGACCGTTCTCCATCAGGACTGGCT |
| | | GAACGGGAAGGAATATAAGTGTAAGGTTAGCAACAA |
| | | AGGTCTGCCCAGTTCTATCGAGAAGACAATCAGCAAG |
| | | GCAAAAGGGCAGCCTCGGGAACCTCAGGTCTACACCC |
| | | TCCCTCCTAGCCAGGAAGAGATGACAAAGAACCAGG |
| | | TCTCTCTCACCTGCCTGGTGAAAGGCTTCTATCCATCT |
| | | GACATTGCTGTGGAGTGGGAATCCAACGGCCAGCCTG |
| | | AAAATAATTATAAGACCACACCCCCCGTCCTTGATTC |
| | | CGATGGATCTTTCTTCCTGTACAGTCGCCTCACCGTCG |
| | | ACAAATCACGGTGGCAGGAAGGTAACGTGTTCAGCTG |
| | | TTCTGTCATGCATGAGGCTCTGCATAACCATTACACA |
| | | CAAAAGTCTTTGTCATTGTCTCTCGGATGATGAGAATT |
| | | CATTGATCATAATCAGCCATACCAC |
| 172 | Heavy chain | EVQLLESGGGLVQPGGSLRLSCAASGFTGSSYAMSWVR |
| | | QAPGKGLEWVSSIWRNGIVTVYADSVKGRFTISRDNSK |
| | | NTLYLQMNSLRAEDTAVYYCAKWSAAFDYWGQGTLV |
| | | TVSSASTKGPSVFPLAPCSRSTSESTAALGCLVKDYFPEP |
| | | VTVSWNSGALTSGVHTFPAVLQSSGLYSLSSVVTVPSSS |
| | | LGTKTYTCNVDHKPSNTKVDKRVESKYGPPCPPCPAPEF |
| | | LGGPSVFLFPPKPKDTLMISRTPEVTCVVVDVSQEDPEV |
| | | QFNWYVDGVEVHNAKTKPREEQFNSTYRVVSVLTVLH |
| | | QDWLNGKEYKCKVSNKGLPSSIEKTISKAKGQPREPQV |
| | | YTLPPSQEEMTKNQVSLTCLVKGFYPSDIAVEWESNGQP |
| | | ENNYKTTPPVLDSDGSFFLYSRLTVDKSRWQEGNVFSCS |
| | | VMHEALHNHYTQKSLSLSLG |
| 173 | Linker | GGGSSGGSGGSGG |
| 174 | PDL1-Ab | DIQMTQSPSSLSASVGDRVTITCRASQSISSYLNWYQQKP |
| | Antibody | GKAPKLLIYAASSLQSGVPSRFSGSGSGTDFTLTISSLQPE |
| | Light Chain | DFATYYCQQDNGYPSTFGGGTKVEIKRTVAAPSVFIFPP |
| | | SDEQLKSGTASVVCLLNNFYPREAKVQWKVDNALQSG |
| | | NSQESVTEQDSKDSTYSLSSTLTLSKADYEKHKVYACEV |
| | | THQGLSSPVTKSFNRGEC |
| 175 | PDL1-Ab | EVQLLESGGGLVQPGGSLRLSCAASGFTFSSYAMSWVR |
| | Antibody | QAPGKGLEWVSSIWRNGIVTVYADSVKGRFTISRDNSK |
| | Heavy | NTLYLQMNSLRAEDTAVYYCAKWSAAFDYWGQGTLV |
| | Chain | TVSSASTKGPSVFPLAPCSRSTSESTAALGCLVKDYFPEP |
| | | VTVSWNSGALTSGVHTFPAVLQSSGLYSLSSVVTVPSSS |
| | | LGTKTYTCNVDHKPSNTKVDKRVESKYGPPCPPCPAPEF |
| | | LGGPSVFLFPPKPKDTLMISRTPEVTCVVVDVSQEDPEV |
| | | QFNWYVDGVEVHNAKTKPREEQFNSTYRVVSVLTVLH |
| | | QDWLNGKEYKCKVSNKGLPSSIEKTISKAKGQPREPQV |
| | | YTLPPSQEEMTKNQVSLTCLVKGFYPSDIAVEWESNGQP |
| | | ENNYKTTPPVLDSDGSFFLYSRLTVDKSRWQEGNVFSCS |
| | | VMHEALHNHYTQKSLSLSLG |
| 176 | VH | QVQLVQSGAEVKKPGASVKVSCKASGYTFTDYGFSWV |
| | | RQAPGQGLEWMGWITAYNGNTNYAQKLQGRVTMTTD |
| | | TSTSTVYMELRSLRSDDTAVYYCARDYFYGMDVWGQG |
| | | TTVTVSS |
| 177 | VH | QVQLVQSGAEVKKPGSSVKVSCKTSGDTFSTYAISWVR |
| | | QAPGQGLEWMGGIIPIFGKAHYAQKFQGRVTITADESTS |
| | | TAYMELSSLRSEDTAVYFCARKFHFVSGSPFGMDVWGQ |
| | | GTTVTVSS |
| 178 | VH | QVQLVQSGAEVKKPGASVKVSCKASGYTFTSYDVHWV |
| | | RQAPGQRLEWMGWLHADTGITKFSQKFQGRVTITRDTS |
| | | ASTAYMELSSLRSEDTAVYYCARERIQLWFDYWGQGT |
| 179 | VH | QVQLVQSGAEVKKPGSSVKVSCKVSGGIFSTYAINWVR |
| | | QAPGQGLEWMGGIIPIFGTANHAQKFQGRVTITADESTS |
| | | TAYMELSSLRSEDTAVYYCARDQGIAAALFDYWGQGT |
| | | LVTVSS |
| 180 | VH | EVQLVESGGGLVQPGRSLRLSCAVSGFTFDDYVVHWVR |
| | | QAPGKGLEWVSGNSGNIGYADSVKGRFTISRDNAKNSL |
| | | YLQMNSLRAEDTALYYCAVPFDYWGQGTLVTVSS |
| 181 | VH | QVQLVQSGAEVKKPGSSVKVSCKTSGDTFSSYAISWVR |
| | | QAPGQGLEWMGGLIPIFGRAHYAQKFQGRVTITADESTS |
| | | TAYMELSSLRSEDTAVYFCARKFHFVSGSPFGMDVWGQ |
| | | GTTVTVSS |
| 182 | VH | QVQLVQSGAEVKKPGSSVKVSCKTSGGTFSSYAISWVR |
| | | QAPGQGLEWMGGIIPIFGKAHYAQKFQGRVTITADESTT |
| | | TAYMELSSLRSEDTAVYYCARKYDYVSGSPFGMDVWG |
| | | QGTTVTVSS |
| 183 | VH | QVQLVQSGAEVKKPGSSVKVSCKASGGTFSSYAINWVR |
| | | QAPGQGLEWMGGIIPIFGSANYAQKFQDRVTITADESTS |
| | | AAYMELSSLRSEDTAVYYCARDSSGWSRYYMDVWGQ |
| | | GTTVTVSS |
| 184 | VH | QVQLVQSGAEVKEPGSSVKVSCKASGGTFNSYAISWVR |
| | | QAPGQGLEWMGGIIPLFGIAHYAQKFQGRVTITADESTN |
| | | TAYMDLSSLRSEDTAVYYCARKYSYVSGSPFGMDVWG |
| | | QGTTVTVSS |
| 185 | VH | EVQLVESGGGLVQPGRSLRLSCAASGITFDDYGMHWVR |
| | | QAPGKGLEWVSGISWNRGRIEYADSVKGRFTISRDNAK |
| | | NSLYLQMNSLRAEDTALYYCAKGRFRYFDWFLDYWGQ |
| | | GTLVTVSS |
| 186 | VH | QMQLVQSGGGLVQPGGSLRLSCAASGFTFSSYWMSWV |
| | | RQAPGKGLEWVANIKQDGSEKYYVDSVKGRFTISRDNA |
| | | KNSLYLQMNSLRAEDTAVYYCARDYFWSGFSAFDIWG |
| | | KGTLVTVS |
| 187 | VL | EIVLTQSPATLSLSPGERATLSCRASQSVSSYLVWYQQK |
| | | PGQAPRLLIYDASNRATGIPARFSGSGSGTDFTLTISSLEP |
| | | EDFAVYYCQQRSNWPRTFGQGTKVEIK |
| 188 | VL | EIVLTQSPATLSLSPGERATLSCRASQSVSSYLAWYQQK |
| | | PGQAPRLLIYDASNRATGIPARFSGSGSGTDFTLTISSLEP |
| | | EDFAVYYCQQRSNWPTFGQGTKVEIK |
| 189 | VL | DIQMTQSPSSLSASVGDRVTITCRASQGISSWLAWYQQK |
| | | PEKAPKSLIYAASSLQSGVPSRFSGSGSGTDFTLTISSLQP |
| | | EDFATYYCQQYNSYPYTFGQGTKLEIK |
| 190 | VL | EIVLTQSPGTLSLSPGERATLSCRASQSVSSSYLAWYQQ |
| | | KPGQAPRLLIYGASSRATGIPDRFSGSGSGTDFTLTISRLE |
| | | PEDFAVYYCQQYGSSPWTFGQGTKVEIK |
| 191 | VL | EIVLTQSPGTLSLSPGERATLSCRASQSVSSSYLAWYQQ |
| | | KPGQAPRLLIYGASSRATGIPDRFSGSGSGTDFTLTISRLE |
| | | PEDFAVYYCQQYGSSPFGGGTKVEIK |
| 192 | VL | EIVLTQSPATLSLSPGERATLSCRASQSVSSYLAWYQQK |
| | | PGQAPRLLIYDASNRATGIPARFSGSGSGTDFTLTISSLEP |
| | | EDFAVYYCQQRSNWPTFGQGTRLEIK |
| 193 | VL | AIQLTQSPSSLSASVGDRVTITCRASQGISSALAWYQQKP |
| | | GKARKLLIYDASSLESGVPSRFSGSGSGTDFTLTISSLQPE |
| | | DFATYYCQQFNSYPFTFGPGTKVDIK |
| 194 | VL | DIVMTQSPSTLSASVGDRVTITCRASQGISSWLAWYQQK |
| | | PGRAPKVLIYKASTLESGVPSRFSGSGSGTDFTLTISSLQP |
| | | EDFATYYCQQSYSTPWTFGQGTKLEIK |
| 195 | VH | EVQLVESGGGLVQPGGSLRLSCAASGFTFSRYWMSWVR |
| | | QAPGKGLEWVANIKQDGSEKYYVDSVKGRFTISRDNAK |
| | | NSLYLQMNSLRAEDTAVYYCAREGGWFGELAFDYWG |
| | | QGTLVTVSS |
| 196 | VL | EIVLTQSPGTLSLSPGERATLSCRASQRVSSSYLAWYQQ |
| | | KPGQAPRLLIYDASSRATGIPDRFSGSGSGTDFTLTISRLE |
| | | PEDFAVYYCQQYGSLPWTFGQGTKVEIK |
| 197 | VH | EVQLVESGGGLVQPGGSLRLSCAASGFTFSDSWIHWVR |
| | | QAPGKGLEWVAWISPYGGSTYYADSVKGRFTISADTSK |
| | | NTAYLQMNSLRAEDTAVYYCARRHWPGGFDYWGQGT |
| | | LVTVSA |
| 198 | VH | EVQLVESGGGLVQPGGSLRLSCAASGFTFSGSWIHWVR |
| | | QAPGKGLEWVAWILPYGGSSYYADSVKGRFTISADTSK |
| | | NTAYLQMNSLRAEDTAVYYCARRHWPGGFDYWGQGT |
| | | LVTVSA |
| 199 | VL | DIQMTQSPSSLSASVGDRVTITCRASQDVSTAVAWYQQ |
| | | KPGKAPKLLIYSASFLYSGVPSRFSGSGSGTDFTLTISSLQ |
| | | PEDFATYYCQQYLYHPATFGQGTKVEIKR |
| 200 | VL | DIQMTQSPSSLSASVGDRVTITCRASQDVSTAVAWYQQ |
| | | KPGKAPKLLIYSASFLYSGVPSRFSGSGSGTDFTLTISSLQ |
| | | PEDFATYYCQQYYNVPWTFGQGTKVEIKR |
| 201 | VL | DIQMTQSPSSLSASVGDRVTITCRASQDVSTAVAWYQQ |
| | | KPGKAPKLLIYSASFLYSGVPSRFSGSGSGTDFTLTISSLQ |
| | | PEDFATYYCQQYYAPPWTFGQGTKVEIKR |
| 202 | VL | DIQMTQSPSSLSASVGDRVTITCRASQDVSTAVAWYQQ |
| | | KPGKAPKLLIYSASFLYSGVPSRFSGSGSGTDFTLTISSLQ |
| | | PEDFATYYCQQYYTVPWTFGQGTKVEIKR |
| 203 | VL | DIQMTQSPSSLSASVGDRVTITCRASQVINTFLAWYQQK |
| | | PGKAPKLLIYSASTLASGVPSRFSGSGSGTDFTLTISSLQP |
| | | EDFATYYCQQYYTVPRTFGQGTKVEIKR |
| 204 | VL | DIQMTQSPSSLSASVGDRVTITCRASQDVSTAVAWYQQ |
| | | KPGKAPKLLIYSASFLYSGVPSRFSGSGSGTDFTLTISSLQ |
| | | PEDFATYYCQQGYGVPRTFGQGTKVEIKR |
| 205 | VL | DIQMTQSPSSLSASVGDRVTITCRASQDVSTAVAWYQQ |
| | | KPGKAPKLLIYSASFLYSGVPSRFSGSGSGTDFTLTISSLQ |
| | | PEDFATYYCQQYLFTPPTFGQGTKVEIKR |
| 206 | VL | DIQMTQSPSSLSASVGDRVTITCRASQDVSTAVAWYQQ |
| | | KPGKAPKLLIYSASFLYSGVPSRFSGSGSGTDFTLTISSLQ |
| | | PEDFATYYCQQYFITPTTFGQGTKVEIKR |
| 207 | VL | DIQMTQSPSSLSASVGDRVTITCRASQDVSTAVAWYQQ |
| | | KPGKAPKLLIYSASFLYSGVPSRFSGSGSGTDFTLTISSLQ |
| | | PEDFATYYCQQYYYTPPTFGQGTKVEIKR |
| 208 | VL | DIQMTQSPSSLSASVGDRVTITCRASQDVSTAVAWYQQ |
| | | KPGKAPKLLIYSASFLYSGVPSRFSGSGSGTDFFLTISSLQ |
| | | PEDFATYYCQQFFYTPPTFGQGTKVEIKR |
| 209 | VL | DIQMTQSPSSLSASVGDRVTITCRASQDVSTAVAWYQQ |
| | | KPGKAPKLLIYSASFLYSGVPSRFSGSGSGTDFTLTISSLQ |
| | | PEDFATYYCQQSLFTPPTFGQGTKVEIKR |
| 210 | VL | DIQMTQSPSSLSASVGDRVTITCRASQDVSTAVAWYQQ |
| | | KPGKAPKLLIYSASFLYSGVPSRFSGSGSGTDFTLTISSLQ |
| | | PEDFATYYCQQSLYTPPTFGQGTKVEIKR |
| 211 | VL | DIQMTQSPSSLSASVGDRVTITCRASQDVSTAVAWYQQ |
| | | KPGKAPKLLIYSASFLYSGVPSRFSGSGSGTDFTLTISSLQ |
| | | PEDFATYYCQQSWYHPPTFGQGTKVEIKR |
| 212 | VL | DIQMTQSPSSLSASVGDRVTITCRASQDVSTAVAWYQQ |
| | | KPGKAPKLLIYSASFLYSGVPSRFSGSGSGTDFTLTISSLQ |
| | | PEDFATYYCQQYFYIPPTFGQGTKVEIKR |
| 213 | VL | DIQMTQSPSSLSASVGDRVTITCRASQDVSTAVAWYQQ |
| | | KPGKAPKLLIYSASFLYSGVPSRFSGSGSGTDFTLTISSLQ |
| | | PEDFATYYCQQYWYTPTTFGQGTKVEIKR |
| 214 | VL | DIQMTQSPSSLSASVGDRVTITCRASQDVSTAVAWYQQ |
| | | KPGKAPKLLIYSASFLYSGVPSRFSGSGSGTDFTLTISSLQ |
| | | PEDFATYYCQQSYFIPPTFGQGTKVEIKR |
| 215 | VH | METGLRWLLLVAVLKGVQCLSVEESGGRLVTPGTPLTL |
| | | TCTASGFTITNYHMFWVRQAPGKGLEWIGVITSSGIGSSS |
| | | TTYYATWAKGRFTISKTSTTVNLRITSPTTEDTATYFCAR |
| | | DYFTNTYYALDIWGPGTLVTVSS |
| 216 | VH | QVQLVQSGAEVKKPGASVKVSCKASGYTFTSYDVHWV |
| | | RQAPGQRLEWMGWLHADTGITKFSQKFQGRVTITRDTS |
| | | ASTAYMELSSLRSEDTAVYYCARERIQLWFDYWGQGTL |
| | | VTVSS |
| 217 | VH | EVQLVESGGGLVQPGRSLRLSCAVSGFTFDDYVVHWVR |
| | | QAPGKGLEWVSGISGNSGNIGYADSVKGRFTISRDNAK |
| | | NSLYLQMNSLRAEDTALYYCAVPFDYWGQGTLVTVSS |
| 218 | VL | MDTRAPTQLLGLLLLWLPGARCALVMTQTPSSTSTAVG |
| | | GTVTIKCQASQSISVYLAWYQQKPGQPPKLLIYSASTLA |
| | | SGVPSRFKGSRSGTEYTLTISGVQREDAATYYCLGSAGS |
| 219 | VH | EVQLLESGGGLVQPGGSLRLSCAASGFTFSSYIMMWVR |
| | | QAPGKGLEWVSSIYPSGGITFYADTVKGRFTISRDNSKN |
| | | TLYLQMNSLRAEDTAVYYCARIKLGTVTTVDYWGQGT |
| | | LVTVSS |
| 220 | VL | QSALTQPASVSGSPGQSITISCTGTSSDVGGYNYVSWYQ |
| | | QHPGKAPKLMIYDVSNRPSGVSNRFSGSKSGNTASLTIS |
| | | GLQAEDEADYYCSSYTSSSTRVFGTGTKVTVL |
| 221 | VH | EVKLQESGPSLVKPSQTLSLTCSVTGYSITSDYWNWIRK |
| | | FPGNKLEYVGYISYTGSTYYNPSLKSRISITRDTSKNQYY |
| | | LQLNSVTSEDTATYYCARYGGWLSPFDYWGQGTTLTVS |
| | | S |
| 222 | VH | EVQLQESGPGLVAPSQSLSITCTVSGFSLTTYSINWIRQPP |
| | | GKGLEWLGVMWAGGGTNSNSVLKSRLIISKDNSKSQVF |
| | | LKMNSLQTDDTARYYCARYYGNSPYYAIDYWGQGTSV |
| 223 | VH | EVKLQESGPSLVKPSQTLSLTCSVTGYSIISDYWNWIRKF |
| | | PGNKLEYLGYISYTGSTYYNPSLKSRISITRDTSKNQYYL |
| | | QLNSVTTEDTATYYCARRGGWLLPFDYWGQGTTLTVSS |
| 224 | VH | EVKLQESGPSLVKPGASVKLSCKASGYTFTSYDINWVK |
| | | QRPGQGLEWIGWIFPRDNNTKYNENFKGKATLTVDTSS |
| | | TTAYMELHSLTSEDSAVYFCTKENWVGDFDYWGQGTT |
| | | LTLSS |
| 225 | VH | EVQLQQSGPDLVTPGASVRISCQASGYTFPDYYMNWVK |
| | | QSHGKSLEWIGDIDPNYGGTTYNQKFKGKAILTVDRSSS |
| | | TAYMELRSLTSEDSAVYYCARGALTDWGQGTSLYVSS |
| 226 | VH | EIVLTQSPATLSLSPGERATLSCRASSSVSYIYWFQQKPG |
| | | QSPRPLIYAAFNRATGIPARFSGSGSGTDYTLTISSLEPED |
| | | FAVYYCQQWSNNPLTFGQGTKVEIK |
| 227 | VH | QVQLVQSGAEVKKPGASVKVSCKASGYTFPDYYMNWV |
| | | RQAPGQGLEWMGDIDPNYGGTNYAQKFQGRVTMTRDT |
| | | SISTAYMELSRLRSDDTAVYYCARGALTDWGQGTMVT |
| | | VSS |
| 228 | VH | QVQLVQSGAEVKKPGASVKVSCKASGYTFPDYYMNWV |
| | | RQAPGQGLEWMGDIDPNYGGTNYAQKFQGRVTMTRDT |
| | | SISTAYMELSRLRSDDTAVYYCARGALTDWGQGTMVT |
| | | VSS |
| 229 | VH | EVQLVQSGAEVKKPGASVKVSCKASGYTFPDYYMNWV |
| | | RQAPGQSLEWMGDIDPNYGGTNYNQKFQGRVTMTVDR |
| | | SSSTAYMELSRLRSDDTAVYYCARGALTDWGQGTMVT |
| | | VSS |
| 230 | VH | EVQLVESGGGLVQPGRSLRLSCTASGYTFPDYYMNWVR |
| | | QAPGKGLEWVGDIDPNYGGTTYAASVKGRFTISVDRSK |
| | | SIAYLQMSSLKTEDTAVYYCTRGALTDWGQGTMVTVSS |
| 231 | VH | EVQLVESGGGLVQPGRSLRLSCTASGYTFPDYYMNWVR |
| | | QAPGKGLEWVGDIDPNYGGTTYNASVKGRFTISVDRSK |
| | | SIAYLQMSSLKTEDTAVYYCARGALTDWGQGTMVTVS |
| | | S |
| 232 | VL | DIVMTQSHKLMSTSVGDRVSITCKASQDVGTAVAWYQ |
| | | QKPGQSPKLLIYWASTRHTGVPDRFTGSGSGTDFTLTISN |
| | | VQSEDLADYFCQQDSSYPLTFGAGTKVELK |
| 233 | VL | DIVTTQSHKLMSTSVGDRVSITCKASQDVGTAVAWYQQ |
| | | KPGQSPKLLIYWASTRHTGVPDRFTGSGSGTDFTLTISNV |
| | | QSEDLADYFCQQDSSYPLTFGAGTKVELK |
| 234 | VL | DIVMTQSPSSLAVSVGEKVSMGCKSSQSLLYSSNQKNSL |
| | | AWYQQKPGQSPKLLIDWASTRESGVPDRFTGSGSGTDF |
| | | TLTISSVKAEDLAVYYCQQYYGYPLTFGAGTKLELK |
| 235 | VL | DIVMTQSPAIMSASPGEKVTMTCSASSSIRYMHWYQQK |
| | | PGTSPKRWISDTSKLTSGVPARFSGSGSGTSYALTISSME |
| | | AEDAATYYCHQRSSYPWTFGGGTKLEIK |
| 236 | VL | QIVLSQSPAILSASPGEKVTMTCRASSSVSYIYWFQQKPG |
| | | SSPKPWIYATFNLASGVPARFSGSGSGTSYSLTISRVETE |
| | | DAATYYCQQWSNNPLTFGAGTKLELK |
| 237 | VL | EIVLTQSPATLSLSPGERATLSCRASSSVSYIYWFQQKPG |
| | | QAPRLLIYAAFNRATGIPARFSGSGSGTDYTLTISSLEPED |
| | | FAVYYCQQWSNNPLTFGQGTKVEIK |
| 238 | VL | QIVLTQSPATLSLSPGERATLSCRASSSVSYIYWFQQKPG |
| | | QSPRPLIYATFNLASGIPARFSGSGSGTSYTLTISRLEPEDF |
| | | AVYYCQQWSNNPLTFGQGTKVEIK |
| 239 | VL | DIQLTQSPSSLSASVGDRVTITCRASSGVSYIYWFQQKPG |
| | | KAPKLLIYAAFNLASGVPSRFSGSGSGTEYTLTISSLQPE |
| | | DFATYYCQQWSNNPLTFGQGTKVEIK |
| 240 | VL | DIQLTQSPSSLSASVGDRVTITCRASSGVSYIYWFQQKPG |
| | | KAPKPLIYAAFNLASGVPSRFSGSGSGTEYTLTISSLQPE |
| | | DFATYYCQQWSNNPLTFGQGTKVEIK |
| 241 | VL | DIQLTQSPSILSASVGDRVTITCRASSSVSYIYWFQQKPG |
| | | KAPKPLIYATFNLASGVPSRFSGSGSGTSYTLTISSLQPED |
| | | FATYYCQQWSNNPLTFGQGTKVEIK |
| 242 | VH | QVQLVQSGAEVKKPGASVKVSCKASGYTFTSYGISWVR |
| | | QAPGQGLEWMGWISAYNGNTNYAQKLQGRVTMTTDT |
| | | STSTAYMELRSLRSDDTAVYYCARALPSGTILVGGWFD |
| | | PWGQGTLVTVSS |
| 243 | VH | EVQLVQSGGGVVQPGRSLRLSCAASGFTFSSYALSWVR |
| | | QAPGKGLEWVSAISGGGGSTYYADSVKGRFTISRDNSK |
| | | NTLYLQMNSLRAEDTAVYYCAKDVFPETFSMNYGMDV |
| | | WGQGTLVTVSS |
| 244 | VH | QVQLVQSGGGVVQPGGSLRLSCAASGFTFDDYAMHWV |
| | | RQAPGKGLEWVSLISGDGGSTYYADSVKGRFTISRDNSK |
| | | NSLYLQMNSLRTEDTALYYCAKVLLPCSSTSCYGSVGA |
| | | FDIWGQGTTVTVSS |
| 245 | VH | QVQLVQSGGSVVRPGESLRLSCVASGFIFDNYDMSWVR |
| | | QVPGKGLEWVSRVNWNGGSTTYADAVKGRFTISRDNT |
| | | KNSLYLQMNNLRAEDTAVYYCVREFVGAYDLWGQGT |
| | | TVTVSS |
| 246 | VH | QVQLVQSGAEVKKPGATVKVSCKVFGDTFRGLYIHWV |
| | | RQAPGQGLEWMGGIIPIFGTANYAQKFQGRVTITTDEST |
| | | STAYMELSSLRSEDTAVYYCASGLRWGIWGWFDPWGQ |
| | | GTLVTVSS |
| 247 | VH | EVQLVQSGAELKKPGSSVKVSCKAFGGTFSDNAISWVR |
| | | QAPGQGPEWMGGIIPIFGKPNYAQKFQGRVTITADESTS |
| | | TAYMVLSSLRSEDTAVYYCARTMVRGFLGVMDVWGQ |
| | | GTTVTVSS |
| 248 | VH | QVQLVQSGGGLVQPGGSLRLSCAASGFTFSSYAMSWVR |
| | | QAPGKGLEWVSAISGSGGSTYYADSVKGRFTISRDNSKN |
| | | TLYLQMNSLRAEDTAVYYCAKDQFVTIFGVPRYGMDV |
| | | WGQGTTVTVSS |
| 249 | VH | QVQLVQSGAEVKKPGSSVKVSCKASGGTFSSYAISWVR |
| | | QAPGQGLEWMGGIIPIFGTANYAQKFQGRVTITADKSTS |
| | | TAYMELSSLRSEDTAVYYCARGRQMFGAGIDFWGPGTL |
| | | VTVSS |
| 250 | VH | EVQLVESGAEVKKPGSSVKYSCKVSGGTFGTYALNWV |
| | | RQAPGQGLEWMGRIVPLIGLVNYAHNFEGRISITADKST |
| | | GTAYMELSNLRSDDTAVYYCAREVYGGNSDYWGQGTL |
| | | VTVSS |
| 251 | VH | QVQLVQSGGEVKKPGASVKVSCKASGYTLSSHGITWVR |
| | | QAPGQGLEWMGWISAHNGHASNAQKVEDRVTMTTDT |
| | | STNTAYMELRSLTADDTAVYYCARVHAALYYGMDVW |
| | | GQGTLVTVSS |
| 252 | VH | QVQLQESGGGVVQPGRSLRLSCSASGFTFSRHGMHWVR |
| | | QAPGKGLEWVAVISHDGSVKYYADSMKGRFSISRDNSN |
| | | NTLYLQMDSLRADDTAVYYCARGLSYQVSGWFDPWG |
| | | QGTLVTVSS |
| 253 | VH | NFMLTQPHSVSESPGKTVTISCTRSSGSIASNYVQWYQQ |
| | | RPGSSPTTVIYEDNQRPSGVPDRFSGSIDTSSNSASLTISG |
| | | LKTKDEADYYCQSYDGITVIFGGGTKLTVL |
| 254 | VH | NFMLTQPHSVSGSPGKTVTLPCTRSSGSIASHYVQWYQQ |
| | | RPGSAPTTVIYEDNKRPSGVPDRFSGSIDSSSNSASLSISG |
| | | LKTEDEADYYCQSYDSSNRWVFGGGTKLTVL |
| 255 | VH | LPVLTQPASLSASPGASASLTCTLRSGLNVGSYRIYWYQ |
| | | QKPGSRPQYLLNYKSDSNKQQASGVPSRFSGSKDASAN |
| | | AGILLISGLQSEDEADYYCMIWYSSAVVFGGGTKLTVL |
| 256 | VL | NFMLTQPHSVSESPGKTVTISCTRSSGNIASNYVQWYQQ |
| | | RPGSAPTTVIYEDNQRPSGVPDRFSGSIDSSSNSASLTISG |
| | | LKTEDEADYYCQSYDSSNLWVFGGGTKLTVL |
| 257 | VL | SSELTQDPAVSVALGQTVRITCQGDSLRSYYASWYQQK |
| | | PGQAPVLVIYGKNNRPSGIPDRFSGSSSGNTASLTITGAQ |
| | | AEDEADYYCNSRDSSGNHYVFGTGTKVTVL |
| 258 | VL | LPVLTQAPSVSVAPGKTARITCGGSDIGRKSVHWYQQKP |
| | | GQAPALVIYSDRDRPSGISERFSGSNSGNTATLTISRVEA |
| | | GDEADYYCQVWDNNSDHYVFGAGTELIVL |
| 259 | VL | QSALTQPASVSGSPGQSITISCTGTSSDVGGYNYVSWYQ |
| | | QHPGKAPKLMIYDVSNRPSGVSNRFSGSKSGNTASLTIS |
| | | GLQAEDEADYYCSSYTSSTLPFGGGTKLTVL |
| 260 | VL | EIVLTQSPATLSLSPGERATLSCRASQSIGNSLAWYQQKP |
| | | GQAPRLLMYGASSRATGIPDRFSGSGAGTDFTLTISSLEP |
| | | EDFATYYCQQHTIPTFSFGPGTKVEVK |
| 261 | VL | DIVMTQTPSFLSASIGDRVTITCRASQGIGSYLAWYQQRP |
| | | GEAPKLLIYAASTLQSGVPSRFSGSGSGTDFTLTISNLQPE |
| | | DFATYYCQQLNNYPITFGQGTRLEIK |
| 262 | VL | QSALTQPPSVSVSPGQTANIPCSGDKLGNKYAYWYQQK |
| | | PGQSPVLLIYQDIKRPSRIPERFSGSNSADTATLTISGTQA |
| | | MDEADYYCQTWDNSVVFGGGTKLTVL |
| 263 | VL | NFMLTQPHSVSESPGKTVTISCTRSSGSIDSNYVQWYQQ |
| | | RPGSAPTTVIYEDNQRPSGVPDRFSGSIDSSSNSASLTISG |
| | | LKTEDEADYYCDSYDSNNRHVIFGGGTKLTVL |
| 264 | VL | NFMLTQPHSVSESPGKTVTISCTRSSGNIGTNYVQWYQQ |
| | | RPGSAPVALIYEDYRRPSGVPDRFSGSIDSSSNSASLIISG |
| | | LKPEDEADYYCQSTHSSGWEFGGGTKLTVL |
| 265 | VL | QSVLTQPPSVSVAPGQTARITCGGNNIGSKGVHWYQQK |
| | | PGQAPVLVVYDDSDRPSGIPERFSGSNSGNTATLTISRVE |
| | | AGDEADYYCQVWDSSSDHWVFGGGTKLTVL |
| 266 | VL | NFMLTQPHSVSESPGKTVTISCTRSSGSIASNYVQWYQQ |
| | | RPGSAPTTVIYEDNQRPSGVPDRFSGSIDSSSNSASLTISG |
| | | LKTEDEADYYCQSYDSTTPSVFGGGTKLTVL |
| 267 | VL | QVQLVQSGAEVKKPGASVKVSCKASGYTFTSYGISWVR |
| | | QAPGQGLEWMGWTSPHNGLTAFAQILEGRVTMTTDTS |
| | | TNTAYMELRNLTFDDTAVYFCAKVHPVFSYALDVWGQ |
| | | GTLVTVSS |
| 268 | VL | EVQLVESGAEVMNPGSSVRVSCRGSGGDFSTYAFSWVR |
| | | QAPGQGLEWMGRIIPILGIANYAQKFQGRVTITADKSTS |
| | | TAYMELSSLRSDDTAVYYCARDGYGSDPVLWGQGTLV |
| | | TVSS |
| 269 | VL | EVQLVQSGAEVKKPGASVKVSCKASGYTFTNYGISWVR |
| | | QAPGQGLEWMGWISAYNGNTNYAQKVQGRVTMTTDT |
| | | STSTGYMELRSDDTAVYYCARGDFRKPFDYWGQG |
| | | TLVTVSS |
| 270 | VH | EVQLVQSGPELKKPGASVKMSCKASGYTFTSYVMHWV |
| | | KQAPGQRLEWIGYVNPFNDGTKYNEMFKGRATLTSDKS |
| | | TSTAYMELSSLRSEDSAVYYCARQAWGYPWGQGTLVT |
| | | VSS |
| 271 | VH | EVQLVQSGAEVKKPGASVKMSCKASGYTFSYVMHWV |
| | | KQAPGQRLEWIGYVNPFNDGTKYNEMFKGRATLTSDKS |
| | | TSTAYMELSSLRSEDSAVYYCARQAWGYPWGQGTLVT |
| | | VSS |
| 272 | VH | EVQLVQSGAEVKKPGASVKMSCKASGYTFTSYVMHWV |
| | | RQAPGQRLEWIGYVNPFNDGTKYNEMFKGRATLTSDKS |
| | | TSTAYMELSSLRSEDTAVYYCARQAWGYPWGQGTLVT |
| | | VSS |
| 273 | VH | EVQLVQSGAEVKKPGASVKMSCKASGYTFTSYVMHWV |
| | | RQAPGQRLEWIGYVNPFNDGTKYNEMFKGRATLTSDKS |
| | | TSTAYMELSSLRSEDTAVYYCARQAWGYPWGQGTLVT |
| | | VSS |
| 274 | VH | EVQLVQSGAEVKKPGASVKMSCKASGYTFTSYVMHWV |
| | | RQAPGQRLEWIGYVNPFNDGTKYNEMFKGRATLTSDKS |
| | | TSTAYMELSSLRSEDTAVYYCARQAWGYPWGQGTLVT |
| | | VSS |
| 275 | VL | DIVLTQSPASLALSPGERATLSCRATESVEYYGTSLVQW |
| | | YQQKPGQPPKLLIYAASSVDSGVPSRFSGSGSGTDFTLTI |
| | | NSLEEEDAAMYFCQQSRRVPYTFGQGTKLEIK |
| 276 | VL | DIVLTQSPATLSLSPGERATLSCRATESVEYYGTSLVQW |
| | | YQQKPGQPPKLLIYAASSVDSGVPSRFSGSGSGTDFTLTI |
| | | NSLEEEDAAMYFCQQSRRVPYTFGQGTKLEIK |
| 277 | VL | EIVLTQSPATLSLSPGERATLSCRATESVEYYGTSLVQW |
| | | YQQKPGQPPKLLIYAASSVDSGVPSRFSGSGSGTDFTLTI |
| | | NSLEEEDAAMYFCQQSRRVPYTFGQGTKLEIK |
| 278 | VL | DIVLTQSPATLSLSPGERATLSCRATESVEYYGTSLVQW |
| | | YQQKPGQPPKLLIYAASSVDSGVPSRFSGSGSGTDFTLTI |
| | | NSLEAEDAATYFCQQSRRVPYTFGQGTKLEIK |
| 279 | VH | EVQLVQSGAEVKKPGSSVKVSCKASGGTFSSYAISWVR |
| | | QAPGQGLEWMGGIIPIFGTANYAQKFQGRVTITADKSTS |
| | | TAYMELSSLRSEDTAVYYCAREGTIYDSSGYSFDYWGQ |
| | | GTLVTVSS |
| 280 | VH | EVQLVQSGAEVKKPGSSVKVSCKASGGTFSSYAISWVR |
| | | QAPGQGLEWMGIINPSGGSTSYAQKFQGRVSMTRDTST |
| | | STVYMELSSLTSEDTAVYYCARDLFPHIYGNYYGMDIW |
| | | GQGTTVTVSS |
| 281 | VH | QVQLVQSGAEVKKPGSSVKVSCKASGGTFSSYAISWVR |
| | | QAPGQGLEWMGGIIPIFGTANYAQKFQGRVTITADKSTS |
| | | TAYMELSSLRSEDTAVYYCARLAVPGAFDIWGQGTMV |
| | | TVSS |
| 282 | VH | EVQLVESGGGVVQPGRSLRLSCAASGFTFSSYAMHWVR |
| | | QAPGKGLAVISYDGSNKYYADSVKGRFTISRDNSKNTL |
| | | YLQMNSLRAEDTAVYYCARGQWLVTELDYWGQGTLV |
| | | TVSS |
| 283 | VH | EVQLVESGSEVEKPGSSVKVSCKASGGTFSDSGISWVRQ |
| | | APGQGLEWMGGIIPMFATPYYAQKFQDRVTITADESTST |
| | | VYMELSGLRSDDTAVFYCARDRGRGHLPWYFDLWGRG |
| | | TLVTVSS |
| 284 | VH | EVQLVESGAEVKKPGSSVKVSCKASGGTFSSYAISWVR |
| | | QAPGQGLEWMGGIIPIFGTANYAQKFQGRVTITADESTS |
| | | TAYMELSSLRSEDTAVYYCARAPYYYYYMDVWGQGTT |
| | | VTVSS |
| 285 | VH | EVQLLESGAEVKKPGSSVKVSCKASGGTLSRYALSWVR |
| | | QAPGQGPEWVGAIIPIFGTPHYSKKFQDRVTITVDTSTNT |
| | | AFMELSSLRFEDTALYFCARGHDEYDISGYHRLDYWGQ |
| | | GTLVTVSS |
| 286 | VH | QVQLVQSGSELKKPGSSVKVSCKASGYSFSGYYIHWVR |
| | | QAPGQGLEWMGWIDPNSGVTNYVRRFQGRVTMTRDTS |
| | | LSTAYMELSGLTADDTAVYYCARDENLWQFGYLDYWG |
| | | QGTLVTVSS |
| 287 | VH | QVQLVQSGAEVKKPGSSVKVSCKASGGTFSRYGVHWV |
| | | RQAPGQGLEWMGRLIPIVSMTNYAQKFQDRVSITTDKS |
| | | TGTAYMELRSLTSEDTALYYCASVGQQLPWVFFAWGQ |
| | | GTLVTVSS |
| 288 | VH | QVQLVESGGGVVQPGRSLRLSCAASGFTFSSYAMHWVR |
| | | QAPGKGLEWVAVISFDGSNKYYADSVRGRFTISRDNSK |
| | | NTLYLQMNSLRTEDTAVYYCARGWLDRDIDYWGQGTL |
| | | VTVSS |
| 289 | VH | EVQLVESGGGVVQPGRSLRLSCAASGFTFSSYAMHWVR |
| | | QAPGKGLEWVAVISFDGSNKYYADSVRGRFTISRDNSK |
| | | NTLYLQMNSLRTEDTAVYYCARGWLDRDIDYWGQGTL |
| | | VTVSS |
| 290 | VH | EVQLVQSGGGLVQPGGSLRLSCAASGFTFSDYGMHWV |
| | | RQPPGKGLEWLAVISYDGSYKIHADSVQGRFTISRDNAK |
| | | NSVFLQMNSLKTEDTAVYYCTTDRKWLAWHGMDVWG |
| | | QGTTVTVSS |
| 291 | VH | EVQLVQSGAEVKKPGSSVKVSCKASGGTFSSYAISWVR |
| | | QAPGQGLEWMGGIIPIFGTANYAQKFQGRVTITADESTS |
| | | TAYMELSSLRSEDTAVYYCARDGIVADFQHWGQGTLV |
| | | TVSS |
| 292 | VH | EVQLVESGAEVKKPGASVKVSCKASGDTFSRYGITWVR |
| | | QAPGRGLEWMGNIVPFFGATNYAQKFQGRLTITADKSS |
| | | YTSYMDLSSLRSDDTAVYYCARDHFYGSGGYFDYWGQ |
| | | GTLVTVSS |
| 293 | VH | EVQLLESGAEVKKPGASVKVSCKASGYTFNSYDINWVR |
| | | QAPGQGLEWMGGIIPVFGTANYAESFQGRVTMTADHST |
| | | STAYMELNNLRSEDTAVYYCARDRWHYESRPMDVWG |
| | | QGTTVTVSS |
| 294 | VH | EVQLVESGGGLVRPGGSLRLACAASGFSFSDYYMTWIR |
| | | QAPGRGLEWIAYISDSGQTVHYADSVKGRFTISRDNTKN |
| | | SLFLQVNTLRAEDTAVYYCAREDLLGYYLQSWGQGTL |
| | | VTVSS |
| 295 | VH | QVQLQQSGPGLVKPSQTLSLTCAISGDSVSSNSAAWNWI |
| | | RQSPSRGLEWLGRTYYRSKWYNDYAVSVKSRITINPDTS |
| | | KNQFSLQLNSVTPEDTAVYYCARDEPRAVAGSQAYYY |
| | | YGMDVWGQGTTVTVSS |
| 296 | VH | EVQLVQSGAEVKKPGASVKVSCKASGYTFTSYMHWV |
| | | RQAPGQGLEWMGIINPSDGSTSYAQKFQGRVTMTRDTS |
| | | TSTVHMELSSLRSEDTAVYYCARDLFPHIYGNYYGMDI |
| | | WGQTTVTVSS |
| 297 | VH | QMQLVQSGGGVVQPGRSLRLSCAASGFTFSSYAMHWV |
| | | RQAPGKGLEWVAVISFDGSNKYYADSVRGRFTISRDNS |
| | | KNTLYLQMNSLRTEDTAVYYCARGWLDRDIDYWGQGT |
| | | LVTVSS |
| 298 | VH | QMQLVQSGGGVVQPGRSLRLSCAASGFTFSSYAMHWV |
| | | RQAPGKGLEWVAVISFDGSNKYYADSVRGRFTISRDNS |
| | | KNTLYLQMNSLRTEDTAVYYCARGWLDRDIDYWGQGT |
| | | LVTVSS |
| 299 | VL | QSVLTQPPSVSAAYGQKVTISCSGNNSNIANNYVSWYQQ |
| | | LPGTAPKLLIYDNNYRPSGIPDRFSGSKSGTSATLDITGL |
| | | QTGDEADYYCGVWDGSLTTGVFGGGTKLTVL |
| 300 | VL | AIQMTQSPSSLSASVGDRVTITCRASQGISNYLAWYQQK |
| | | PGKVPKLLIYAASTLESGVPSRFSGSGSGTDFTLTISSLQP |
| | | EDLATYYCQQLHTFPLTFGGGTKVEIK |
| 301 | VL | QPVLTQPPSASGSPGQSVTISCTGTSSDVGAYNFVSWYR |
| | | QHPGKAPKLMIYEVNKRPSGVPDRFSGSKSGNTASLTVS |
| | | GLQAEDEADYYCSSYAGTNSLGIFGTGTKLTVL |
| 302 | VL | QSVVTQPPSVSAAPGQKVTISCSGSSSDIGNHYVSWYQQ |
| | | LPGTAPKLLIYDNNQRPSGIPDRFSGSKSGTSATLAITGL |
| | | QTGDEADYYCGTWDNSLSPHLLFGGGTKLTVL |
| 303 | VL | QSVLTQPPSVSAAPGQKVTISCSGSSSNMGNNYVSWYK |
| | | QVPGTAPKLLIYENDKRPSGIPDRFSGSKSGTSATLGITG |
| | | LQTGDEADYYCGTWDNSLSGFVFASGTKVTVL |
| 304 | VL | QSALTQPASVSGSLGQSVTISCTGSSSDVGSYNLVSWYQ |
| | | QHPGKAPNLMIYDVSKRSGVSNRFSGSKSGNTASLTISG |
| | | LQAEDEADYYCSSYTGISTVVFGGGTKLTVL |
| 305 | VL | QSALTQPASVSGSLGQSVTISCTGSSSDVGSYNLVSWYQ |
| | | QHPGKAPKLMIYEVSKRPSGVSNRFSGSKSGNTASLTIS |
| | | GLQAEDEADYYCSSYGGFNNLLFGGGTKLTVL |
| 306 | VL | DIVMTQSPSSLSASIGDRVTITCRASQRISAYVNWYQQKP |
| | | GKAPKVLIYAASSLRGVPSRFSGSGSGTDFTLTISSLQPE |
| | | DFATYYCQQTYSSPWTFGQGTKVEIK |
| 307 | VL | QSVLTQPPSASGSPGQSVTISCTGTSSDIGGYDSVSWYQQ |
| | | HPGKAPKLMIYDVSKRPSGVSNRFSGSKSGNTASLTISG |
| | | LQAEDEADYYCSSYTSSSTFFYVFGTGTKVTVL |
| 308 | VL | LPVLTQPASVSGSPGQSITISCTGTTSDIGGYDYVSWYQQ |
| | | HPGKAPKLMIYDVSKRPSGVSNRFSGSKSGNTASLTISG |
| | | LQAEDEADYYCSSYTSSSTHVFGTGTKLTVL |
| 309 | VL | QSALTQPASVSGSPGQSITISCTGTSSDVGGYNYVSWYQ |
| | | QHPGKAPKLMIYDVSNRPSGVSNRFSGSKSGNTASLTIS |
| | | GLQAEDEADYYCSSYRSSTLGPVFGGGTKLTVL |
| 310 | VL | QAGLTQPPSVSEAPRQRVTISCSGSSSNIGNNAVNWYQQ |
| | | LPGKAPKLLIYYDDLLPSGVSDRFSGSKSGTSASLAISGL |
| | | QSEDEADYYCAAWDDSLNGYVFGTGTKLTVL |
| 311 | VL | QSALTQPASVSGSPGQSITISCTGTSSDVGGYNYVSWYQ |
| | | QHPGKAPKLMIYDVSKRPSGVPDRFSGSKSGNTASLTIS |
| | | GLQAEDEADYYCSSYTSSTTHVFGTKVTVL |
| 312 | VL | QSVVTQPPSVSAAPGQKVTISCSGSSSNIGNNYVSWYQQ |
| | | LPGTAPKLLIYDNNKRPSGIPDRFSGSKSGTSATLGITGL |
| | | QTGDEADYYCGTWDSSLSVWVFGGGTQLTVL |
| 313 | VL | QSVLTQPASVSGSPGQSITISCTGTSSDVGGYNYVSWYQ |
| | | QHPGRAPRLMIYDVSNRPSGVSNRFSGSKSGNTASLTIS |
| | | GLQAEDEGDYYCSSYTSGGTLGPVFGGGTKLTVL |
| 314 | VL | QAGLTQPPSASGTPGQRVTISCSGSSSNIGSNTVNWYQQ |
| | | LPGTAPKLLIYSNNQRPSGVPDRFSGSKSGTSASLAISGL |
| | | QSEDEADYYCAAWDDSLNGWVFGGGTKLTVL |
| 315 | VL | AIRMTQSPSSLSASVGDRVTITCRASQSISNYLNWYQQR |
| | | PGKAPNLLIYAASSLQSGVPSRFSGSGSGTDFTLTISSLQP |
| | | EDFATYYCQQTYSTPYTFGQGTKLEIAK |
| 316 | VL | QSVLTQPASVSGSPGQSITISCTGTSSDVGGYNYVSWYR |
| | | QHPGKAPKLMIYDVSYRPSGVSNRFSGSKSGNTASLTIS |
| | | GLQAEDEADYYCSSYTDSSTRYVFGTGTKLTVL |
| 317 | VL | QPVLTQPPSASGTPGQRVAISCSGSRSNIEINSVNWYQQL |
| | | PGTAPKLLIYDNNKRPSGIPDRFSGSKSGTSATLGITGLQ |
| | | TGDEADYYCGSWDSSLSADVFGTGTKLTVL |
| 318 | VL | QSVLTQPPSVSAAPGKKVTISCSGSSSNIGNNYVSWYQQ |
| | | LPGTAPKLLIYRNNQRPSGVPDRFSGSKSGTSASLAISGL |
| | | QSEDEADYYCATWDDSLNGWVFGGGTKLTVL |
| 319 | VL | QSVVTQPPSVSGAPGQRVTISCTGSSSNIGAGYDVHWYQ |
| | | QLPGTAPKLLIYGNNNRHSGVPDRFSGSKSGTSASLAITG |
| | | LQAEDEAEFFCGTWDSRLTTYVFGSGTKLTVL |
| 320 | VL | QSVVTQPPSVSAAPGQKVTISCSGSSSNIGNNYVSWYQQ |
| | | LPGTAPKLLIYDNNKRPSGIPDRFSGSKSGTSATLGITGL |
| | | QTFGDEADYYCGTWDSSLSAVVFGGGTKLTVL |
| 321 | VL | VIWMTQSPSSLSASVGDRVTITCAASSLQSWYQQKPGK |
| | | APKLLIYEASTLESGVPSRFSGSGSGTEFTLTISSLQPEDF |
| | | ATYYCQQSYSTPYTFGQGTKLEIK |
| 322 | VL | QSVVTQPPSVSAAPGQKVTISCSGSSSNIGNNYVSWYQQ |
| | | VPGTAPKLLIYDNNKRPSGIPDRFSGSNSDTSATLGITGL |
| | | QTGDEADYYCGTWDSSLSAWVFGGGTKLTVL |
| 323 | VL | QSVVTQPPSVSAAPGQKVTISCSGSSSNIGNNYVSWYQQ |
| | | VPGTAPKLLIYDNNKRPSGIPDRFSGSNSDTSATLGITGL |
| | | QTGDEADYYCGTWDSSLSAGSVVFGGGTKLTVL |
| 324 | VL | SYELMQPPSVSVAPGKTATIACGGENIGRKTVHWYQQK |
| | | PGQAPVLVIYYDSDRPSGIPEPFSGSNSGNTATLTISRVE |
| | | AGDEADYYCLVWDSSSDHRIFGGGTKLTVL |
| 325 | VL | SYELMQPPSVSVAPGKTATIACGGENIGRKTVHWYQQK |
| | | PGQAPVLVIYYDSDRPSGIPEPFSGSNSGNTATLTISRVE |
| | | AGDEADYYCLVWDSSSDHRIFGGGTKLTVL |
| 326 | VL | SYELMQPPSVSVAPGKTATIACGGENIGRKTVHWYQQK |
| | | PGQAPVLVIYYDSDRPSGIPEPFSGSNSGNTATLTISRVE |
| | | AGDEADYYCLVWDSSSDHRIFGGGTKLTVL |
| 327 | VL | SYELMQPPSVSVAPGKTATIACGGENIGRKTVHWYQQK |
| | | PGQAPVLVIYYDSDRPSGIPEPFSGSNSGNTATLTISRVE |
| | | AGDEADYYCLVWDSSSDHRIFGGGTKLTVL |
| 328 | HC | QVQLVQSGVEVKKPGASVKVSCKASGYTFTNYYMYW |
| | | VRQAPGQGLEWMGGINPSNGGTNFNEKFKNRVTLTTDS |
| | | STTTAYMELKSLQFDDTAVYYCARRDYRFDMGFDYWG |
| | | QGTTVTVSSASTKGPSVFPLAPCSRSTSESTAALGCLVK |
| | | DYFPEPVTVSWNSGALTSGVHTFPAVLQSSGLYSLSSVV |
| | | TVPSSSLGTKTYTCNVDHKPSNTKVDKRVESKYGPPCPP |
| | | CPAPEFLGGPSVFLFPPKPKDTLMISRTPEVTCVVVDVSQ |
| | | EDPEVQFNWYVDGVEVHNAKTKPREEQFNSTYRVVSV |
| | | LTVLHQDWLNGKEYKCKVSNKGLPSSIEKTISKAKGQP |
| | | REPQVYTLPPSQEEMTKNQVSLTCLVKGFYPSDIAVEWE |
| | | SNGQPENNYKTPPPVLDSDGSFFLYSRLTVDKSRWQEG |
| | | NVFSCSVMHEALHNHYTQKSLSLSLGK |
| 329 | HC | QVQLVESGGGVVQPGRSLRLDCKASGITFSNSGMHWVR |
| | | QAPGKGLEWVAVIWYDGSKRYYADSVKGRFTISRDNS |
| | | KNTLFLQMNSLRAEDTAVYYCATNDDYWGQGTLVTVS |
| | | SASTKGPSVFPLAPCSRSTSESTAALGCLVKDYFPEPVTV |
| | | SWNSGALTSGVHTFPAVLQSSGLYSLSSVVTVPSSSLGT |
| | | KTYTCNVDHKPSNTKVDKRVESKYGPPCPPCPAPEFLG |
| | | GPSVFLFPPKPKDTLMISRTPEVTCVVVDVSQEDPEVQF |
| | | NWYVDGVEVHNAKTKPREEQFNSTYRVVSVLTVLHQD |
| | | WLNGKEYKCKVSNKGLPSSIEKTISKAKGQPREPQVYTL |
| | | PPSQEEMTKNQVSLTCLVKGYPSDIAVEWESNGQPEN |
| | | NYKTTPPVLDSDGSFFLYSRLTVDKSRWQEGNVFSCSV |
| | | MHEALHNHYTQKSLSLSLGK |
| 330 | LC | EIVLTQSPATLSLSPGERATLSCRASKGVSTSGYSYLHW |
| | | YQQKPGQAPRLLIYLASYLESGVPARFSGSGSGTDFTLTI |
| | | SSLEPEDFAVYYCQHSRDLPLTFGGGTKVEIKRTVAAPS |
| | | VFIFPPSDEQLKSGTASVVCLLNNFYPREAKVQWKVDN |
| | | ALQSGNSQESVTEQDSKDSTYSLSSTLTLSKADYEKHKV |
| | | YACEVTHQGLSSPVTKSFNRGEC |
| 331 | LC | EIVLTQSPATLSLSPGERATLSCRASQSVSSYLAWYQQK |
| | | PGQAPRLLIYDASNRATGIPARFSGSGSGTDFTLTISSLEP |
| | | EDFAVYYCQQSSNWPRTFGQGTKVEIKRTVAAPSVFIFP |
| | | PSDEQLKSGTASVVCLLNNFYPREAKVQWKVDNALQS |
| | | GNSQESVTEQDSKDSTYSLSSTLTLSKADYEKHKVYACE |
| | | VTHQGLSSPVTKSFNRGEC |
| 332 | VH | EVQLVESGGGLVQPGGSLRLSCAASGFTFSDSWIHWVR |
| | | QAPGKGLEWVAWISPYGGSTYYADSVKGRFTISADTSK |
| | | NTAYLQMNSLRAEDTAVYYCARRHWPGGFDYWGQGT |
| | | LVTVSSASTK |
| 333 | VH | EVQLVESGGGLVQPGGSLRLSCAASGFTFSDSWIHWVR |
| | | QAPGKGLEWVAWISPYGGSTYYADSVKGRFTISADTSK |
| | | NTAYLQMNSLRAEDTAVYYCARRHWPGGFDYWGQGT |
| | | LVTVSS |
| 334 | HC | EVQLVESGGGLVQPGGSLRLSCAASGFTFSDSWIHWVR |
| | | QAPGKGLEWVAWISPYGGSTYYADSVKGRFTISADTSK |
| | | NTAYLQMNSLRAEDTAVYYCARRHWPGGFDYWGQGT |
| | | LVTVSSASTKGPSVFPLAPSSKSTSGGTAALGCLVKDYF |
| | | PEPVTVSWNSGALTSGVHTFPAVLQSSGLYSLSSVVTVP |
| | | SSSLGTQTYICNVNHKPSNTKVDKKVEPKSCDKTHTCPP |
| | | CPAPELLGGPSVFLFPPKPKDTLMISRTPEVTCVVVDVSH |
| | | EDPEVKFNWYVDGVEVHNAKTKPREEQYASTYRVVSV |
| | | LTVLHQDWLNGKEYKCKVSNKALPAPIEKTISKAKGQP |
| | | REPQVYTLPPSREEMTKNQVSLTCLVKGFYPSDIAVEWE |
| | | SNGQPENNYKTTPPVLDSDGSFFLYSKLTVDKSRWQQG |
| | | NVFSCSVMHEALHNHYTQKSLSLSPG |
| 335 | LC | DIQMTQSPSSLSASVGDRVTITCRASQDVSTAVAWYQQ |
| | | KPGKAPKLLIYSASFLYSGVPSRFSGSGSGTDFTLTISSLQ |
| | | PEDFATYYCQQYLYHPATFGQGTKVEIKRTVAAPSVFIF |
| | | PPSDEQLKSGTASVVCLLNNFYPREAKVQWKVDNALQS |
| | | GNSQESVTEQDSKDSTYSLSSTLTLSKADYEKHKVYACE |
| | | VTHQGLSSPVTKSFNRGEC |
| 336 | VH | EVQLVESGGGLVQPGGSLRLSCAASGFTFSRFWMSWVR |
| | | QAPGKGLEWVANINQDGTEKYYVDSVKGRFTISRDNAK |
| | | NSLYLQMNSLRAGDTAVYYCANTYYDFWSGHFDYWG |
| | | QGTLVTVSS |
| 337 | VH | QEHLVESGGGVVQPGRSLRLSCEASGFTFSNFGMHWVR |
| | | QAPGKGLEWVAALWSDGSNKYYADSVKGRVTISRDNS |
| | | KNTLYLQMNSLRAEDTAVYYCARGRGAPGIPIFGYWGQ |
| | | GTLVTVSS |
| 338 | VH | EVQLVESGGGLVKPGGSLRLSCAASGFTFSNAWMSWV |
| | | RQAPGKGLEWVGRIKRKTDGGTTDYAAPVKGRFTISRD |
| | | DSKNTLHLQMNSLKTEDTAVYYCTTDDIVVVPAVMRE |
| | | YYFGMDVWGQGTTVTVSS |
| 339 | VH | QVQLVQSGAEVKKPGASVQVSCKASGYSFTGYYIHWV |
| | | RQAPGQGLEWMGWINPNSGTKKYAHKFQGRVTMTRD |
| | | TSIDTAYMILSSLISDDTAVYYCARDEDWNFGSWFDSW |
| | | GQGTLVTVSS |
| 340 | VH | QVHLVQSGAEVKKPGASVKVSCKASGYTFTGYYIHWV |
| | | RQAPGHGLEWMGWLNPNTGTTKYIQNFQGRVTMTRDT |
| | | SSSTAYMELTRLRSDDTAVYYCARDEDWNYGSWFDTW |
| | | GQGTLVTVSS |
| 341 | VH | EVQLVESGGGVVRPGGSLRLSCAASGFTFDDYGMTWV |
| | | RQAPGRGLEWVSGIHWHGKRTGYADSVKGRFTISRDNA |
| | | KKSLYLQMNSLKGEDTALYHCVRGGMSTGDWFDPWG |
| | | QGTLVIVSS |
| 342 | VH | EVQLVESGGGVVRPGGSLRLSCAASGFTFDDYGMTWV |
| | | RQVPGKGLEWVSGIHWSGRSTGYADSVKGRFTISRDNA |
| | | KNSLYLQMNSLRAEDTALYYCARGGMSTGDWFDPWG |
| | | QGTLVTVSS |
| 343 | VH | EVQLVESGGGLVQPGGSLRLSCAASGFTVGSNYMNWV |
| | | RQAPGKGLEWVSVIYSGGSTYYADSVKGRFTISRLTSKN |
| | | TLYLQMSSLRPEDTAVYYCARGIRGLDVWGQGTTVTVS |
| | | S |
| 344 | VH | EERLVESGGDLVQPGGSLRLSCAASGITVGTNYMNWVR |
| | | QAPGKGLEWVSVISSGGNTHYADSVKGRFIMSRQTSKN |
| | | TLYLQMNSLETEDTAVYYCARGIRGLDVWGQGTMVTV |
| | | SS |
| 345 | VH | QVQLVQSGAEVKMPGSSVRVSCKASGGIFSSSTISWVRQ |
| | | APGQGLEWMGEIIPVFGTVNYAQKFQDRVIFTADESTTT |
| | | AYMELSSLKSGDTAVYFCARNWGLGSFYIWGQGTMVT |
| | | VSS |
| 346 | VH | EVQLVESGGDLVHPGRSLRLSCAASGFPFDEYAMHWVR |
| | | QVPGKGLEWVSGISWSNNNIGYADSVKGRFTISRDNAK |
| | | NSLYLQMNSLRPEDTAFYYCAKSGIFDSWGQGTLVTVS |
| | | S |
| 347 | VH | EVQLVESGGGVVQPGRSLRLSCAASGFTFSSYGMHWVR |
| | | QAPGKGLEWVTLISYEGRNKYYADSVKGRFTISRDNSK |
| | | NTLYLQMNSLRAEDTAVYYCAKDRTLYGMDVWGQGT |
| | | TVTVSS |
| 348 | VH | QVTLRESGPALVKTTQTLTLTCTFSGFSLSTNRMCVTWI |
| | | RQPPGKALEWLARIDWDGVKYYNTSLKTRLTISKDTSK |
| | | NQVVLTMTNMDPVDTATFYCARSTSLTFYYFDYWGQG |
| | | TLVTVSS |
| 349 | VH | EVQLVESGGGLVQPGGSLRLSCAASEFTVGTNHMNWV |
| | | RQAPGKGLEWVSVIYSGGNTFYADSVKGRFTISRHTSKN |
| | | TLYLQMNSLTAEDTAVYYCARGLGGMDVWGQGTTVT |
| | | VSS |
| 350 | VH | EVQLVESGGGLVQRGESLRLYCAASGFTFSKYWMNWV |
| | | RQAPGKGLEWVANIKGDGSEKYYVDSVKGRFTISRDNA |
| | | KNSLYLQMNSLRAEDTAVYYCARDYWGSGYYFDFWG |
| | | QGTLVTVSS |
| 351 | VH | EVQLVESGGGLVQSGGSLRLSCAASGFTFSSYWMSWVR |
| | | QAPGKGLEWVANIKQDGSEKYYVDSVKGRFTISRDNAK |
| | | NSLYLQMNSLRADDTAVYYCARDDIVVVPAPMGYYYY |
| | | YFGMDVWGQGTTVTVSS |
| 352 | VH | EVQLVESGGGLVQPGRSLRLSCAASGFTFDDFAMHWVR |
| | | QAPGKGLEWVSGISWTGGNMDYANSVKGRFTISREDA |
| | | KNSLYLQMNSLRAADTALYYCVKDIRGIVATGGAFDIW |
| | | GRGTMVTVSS |
| 353 | VH | EVQLVESGGGLVQPGGSLRLSCAASGFTVGTNYMNWV |
| | | RQAPGKGLEWISVIYSGGSTFYADSVKGRFTISRQTSQN |
| | | TLYLQMNSLRPEDTAVYYCARGIRGFDIWGQGTMVTVS |
| | | S |
| 354 | VH | EVQLVESGGGLVQPGGSLRLSCAAGFTISTNYMNWVR |
| | | QAPGKGLEWVAVIYSSGSTYYIDSVKGRFTISRLTSKNT |
| | | VYLQMSSLNSEDTAVYYCARGIRGFDIWGQGTMVTVSS |
| 355 | VH | EVQLVESGGGLVQPGRSLRLSCAASGFTIDDSAMHWVR |
| | | QTPGKGLEWVSGISWKSGSIGYADSVRGRFTISRDNAKN |
| | | SLYLQMNSLRVEDTALYYCVKDIRGNWNYGGNWFDP |
| | | WGQGTLVTVSS |
| 356 | VH | EVQLVESGGGLVQPGGSLRLSCEASGFTVGVNHMNWV |
| | | RQAPGKGLEWVSVIFSSGRTFYGDYVKGRLTIFRQTSQN |
| | | TVYLQMNSLRSEDTAIYYCARGIGGLDIWGRGTMVTVS |
| | | S |
| 357 | VH | EVQLVESGGGLVQPGRSLRLSCAASGFTFDDYALHWVR |
| | | QAPGKGLEWVSGISWTGGTIDYADSVKGRFTISRDNAK |
| | | NSLYLQMSSLRTEDTAIYYCTRDIRGNWKYGGWFDPW |
| | | GQGTLVTVSS |
| 358 | VH | QVQLVQSGTEVKKPGASVKVSCKASGYTFTAYYMHWV |
| | | RQAPGQGLDWMGWISPNSGFTNYAQKFQGRVTMTRDT |
| | | SINTFYMELSGLRSDDTAVYYCAREGSTHHNSFDPWGQ |
| | | GTLVTVSS |
| 359 | VH | EVQLVESGGGLVQPGGSLRLSCAASGFTVGTNFMNWV |
| | | RQAPGKGLEWVSAIYSGGTANYADSVKGRFTISRDTSR |
| | | NTLYLQMNSLRTEDTAVYYCARGGGMDVWGQGTTVT |
| | | VSS |
| 360 | VH | QVQLVQSGAEVKKPGSSVKVSCKASGGTFNTYVLSWV |
| | | RQAPGQGLEWMGEIIPILGAANYAQNFQGRVTFTTDEST |
| | | NTAYMDLSSRsEDTAVYYCARDRTSGGFDPWGQGTL |
| | | VTVSS |
| 361 | VH | QVQLVQSGAEVEKPGASVKVSCKASGYIFTHYGISWVR |
| | | QAPGQGLEWVGWISPYNGYTDYAQKLQGRVTLTTDTS |
| | | TTTAYMELRNLRSDDTAMYYCSRGRGPYWSFDLWGRG |
| | | TLVTVSS |
| 362 | VL | DIQMTQSPSTLSASVGDRVTITCRASQSISNWLAWYQQK |
| | | PGKAPKLLIYKASSLESGVPSRFSGSGSGTEPTLTISSLQP |
| | | DDFATYYCQQYHSYSYTFGQGTKEIK |
| 363 | VL | DIQMTQSPSSLSASVGDRVTITCRASQGIRNDLGWYQQK |
| | | PGKAPKRLIYTASSLQSGVPSRFSGSGSGTEFTLTISSLQP |
| | | EDFATYYCLQHNSYPLTFGGGTKVAIK |
| 364 | VL | DIQMTQSPSSLSASVGDRVTITCRTSQGIRNDLGWYQQK |
| | | PGKAPKRLIYAASSLQSGVPSRFSGSGSGTEFTLTISSLQP |
| | | EDFATYYCLQHNNYPYTFGQGTKLEIK |
| 365 | VL | DIVMTQTPLSSPVTLGQPASISCRSSQTLVHGDGNTYLS |
| | | WIQQRPGQPPRLLIYKVSNQFSGVPDRFSGSGAGTDFTL |
| | | KISRVEAEDVGLYFCMQATHFPITFGQGTRLEIK |
| 366 | VL | DIVMTQTPLSSPVTLGQPASISCRSSPSLVHSDGNTYLSW |
| | | LQQRPGQPPRLLIYKISNRFSGVPDRFSGSGAGTTDFTLKIS |
| | | RVEAEDVGVYYCMQATHFPITFGQGTRLEIR |
| 367 | VL | DIQMTQSPSSLSASLGDRVTITCRASQSINSYLNWYQQK |
| | | PGKAPKLLIYVASSLQSGVPSRFSGSGSGTEFTLTISNLQP |
| | | EDFATYYCQQSYSTPPITFGQGTRLEIK |
| 368 | VL | DIQMTQSPSSLSASVGDRVTITCRASQSISSYLNWYQQKP |
| | | GKAPKLLIYVASSLQSGVPSRFSGSGSGTDFTLTISSLQPE |
| | | DFATYYCQQSYSTPPITFGQGTRLEIK |
| 369 | VL | DIQMTQSPSSLSASVGDRVTITCRASQTINIYLNWYQQKP |
| | | GRAPRLLIYAASSLQSGVPSRFSGSGSGTDFTLTISSLQPE |
| | | DFATYYCHQSYSTPPTIFGQGTRLEIK |
| 370 | VL | DIQMTQSPSSLSASVGDRVTITCRASQSMSSYLNWYQQK |
| | | PGRAPKLLIFAASSLQSGVPSRFSGSGSGTDFTLTISSLQP |
| | | EDFATYYCQQSYSTPPITFGQGTRLEIK |
| 371 | VL | EIVLTQSPGTLSLSPGERATLSCRASQSFNFNYLAWYQQ |
| | | KPGQAPRLLIYGASSRATGIPDRFSGSGSGTDFTLTINRLE |
| | | PEDFGVFYCQQYESAPWTFGQGTKVEIK |
| 372 | VL | DIQMTQSPSSLSASVGDRVTITCRASQSISSYLNWYQQKP |
| | | GKLLIYAASSLQSGVPSRFSGGGSGTDFTLTISSLRPEDFA |
| | | TYYCQQSYCTPPITFGQGTRLEIK |
| 373 | VL | DIQMTQSPSSLSASVGDRVTITCRASQSISSYLNWYQQKP |
| | | GKAPKLLIYAASSLQSGVPSRFSGSGSGTDFTLTISSLQPE |
| | | DFATYYCQQSYSTPPITFGQGTRLEIK |
| 374 | VL | DRVTITCRASQVISNYLAWYQQKPGKVPRLLIYAASTLQ |
| | | SGVPSRFSGSGSGTDFTLTISSLQPEDVATYYCQKYNSAP |
| | | RTFGQGTKVEIK |
| 375 | VL | DIQMTQSPSSLSASVGDRVTITCRASQNINNYLNWYQQK |
| | | PGKAPKLLIYAASSFQNAVPSRFSGSGSGTDFTLTISSLQP |
| | | EDFATYYCQQSYNTPLTFGGGTKVEIK |
| 376 | VL | DIQMTQSPSSLSASVGDRVTITCRASQGIRNDLGWYQQK |
| | | PGKAPKRLIYAASSLQSGVPSRFSGSGSGTEFTLTISSLQP |
| | | EDFATYYCLQHNSYPYTFGQGTKLEIK |
| 377 | VL | DIQMTQSPSSLSASVGDRVTITCRASQSISSYLNWYQQKP |
| | | GKAPKILLYAASSLQSGVPSRFSGSGSGTDFTLTISSLQPE |
| | | DFATYYCQQSYSTPPITFGQGTRLEIK |
| 378 | VH | QSLEESGGRLVKPDETLTITCTVSGIDLSSNGLTWVRQAP |
| | | GEGLEWIGTINKDASAYYASWAKGRLTISKPSSTKVDLK |
| | | ITSPTTEDTATYFCGRIAFKTGTSIWGPGTLVTVSS |
| 379 | VL | AIVMTQTPSPVSAAVGGTVTINCQASESVYSNNYLSWFQ |
| | | QKPGQPPKLLIYLASTLASGVPSRFKGSGSGTQFTLTISG |
| | | VQCDDAATYYCIGGKSSSTDGNAFGGGTEVVVR |
| 380 | VH | QMQLVQSGAEVKKPGSSVKVSCKASGGTFSSYAISWVR |
| | | QAPGQGLEWMGGIIPIFGTANYAQKFQGRVTITADESTS |
| | | TAYMELSSLRSEDTAVYYCARGNIVATITPLDYWGQGT |
| | | LVTVSS |
| 381 | VH | QPVLTQPPSVSAAPGQKVTISCSGSSSNIANNYVSWYQQ |
| | | LPGTAPKLLIFANNKRPSGIPDRFSGSKSGTSGTSAALDITGL |
| | | QTGDEADYYCGTWDSDLRAGVFGGGTKLTVL |
| 382 | VH | EVQLVQSGAEVKKPGSSVKVSCKASGGTFSSYAISWVR |
| | | QAPGQGLEWMGGIIPIFGTANYAQKFQGRVTITADKSTS |
| | | TAYMELSSLRSEDTAVYYCAREGTIYDSSGYSFDYWGQ |
| | | GTLVTVSS |
| 383 | VH | QVQLVESGGGVVQPGRSLRLSCAASGFTFSSYAMHWVR |
| | | QAPGKGLEWVAVISFDGSNKYYADSVRGRFTISRDNSK |
| | | NTLYLQMNSLRTEDTAVYYCARGWLDRDIDYWGQGTL |
| | | VTVSS |
| 384 | VH | QVQLVESGGGVVQPGRSLRLSCAASGFTFSSYAMHWVR |
| | | QAPGKGLEWVAVISFDGSNKYYADSVRGRFTISRDNSK |
| | | NTLYLQMNSLRTEDTAVYYCARGWLDRDIDYWGQGTL |
| | | VTVSS |
| 385 | VH | QVQLVESGGGVVQPGRSLRLSCAASGFTFSSYAMHWVR |
| | | QAPGKGLEWVAVISFDGSNKYYADSVRGRFTISRDNSK |
| | | NTLYLQMNSLRTEDTAVYYCARGWLDRDIDYWGQGTL |
| | | VTVSS |
| 386 | VH | QVQLVESGGGVVQPGRSLRLSCAASGFTFSSYAMHWVR |
| | | QAPGKGLEWVAVISFDGSNKYYADSVRGRFTISRDNSK |
| | | NTLYLQMNSLRTEDTAVYYCARGWLDRDIDYWGQGTL |
| | | VTVSS |
| 387 | VH | QVQLVESGGGVVQPGRSLRLSCAASGFTFSSYAMHWVR |
| | | QAPGKGLEWVAVISFDGSNKYYADSVRGRFTISRDNSK |
| | | NTLYLQMNSLRTEDTAVYYCARGWLDRDIDYWGQGTL |
| | | VTVSS |
| 388 | VH | QVQLVESGGGVVQPGRSLRLSCAASGFTFSSYAMHWVR |
| | | QAPGKGLEWVAVISFDGSNKYYADSVRGRFTISRDNSK |
| | | NTLYLQMNSLRTEDTAVYYCARGWLDRDIDYWGQGTL |
| | | VTVSS |
| 389 | VH | QVQLVQSGAEVKKPGSSVKVSCKASGGTFSRYGVHWV |
| | | RQAPGQGLEWMGRLIPIVSMTNYAQKFQDRVSITTDKS |
| | | TGTAYMELRSLTSEDTALYYCASVGQQLPWVFFAWGQ |
| | | GTLVTVSS |
| 390 | VH | QMQLVQSGGGVVQPGRSLRLSCAASGFTFSSYAMHWV |
| | | RQAPGKGLEWVAVISFDGSNKYYADSVRGRFTISRDNS |
| | | KNTLNLQMNSLRTEDTAVYYCARGWLDRDIDYWGQGT |
| | | LVTVSS |
| 391 | VH | QVQLVQSGGGVVQPGRSLRLSCAASGFTFSSYAMHWV |
| | | RQAPGKGLEWVAVISFDGSNKYYADSVRGRFTISRDNS |
| | | KNTLYLQMNSLRTEDTAVYYCARGWLDRDIDYWGQGT |
| | | LVTVSS |
| 392 | VH | QMQLVQSGAEVKKPGSSVKVSCKASGGTFSSYAYSWV |
| | | RQAPGQGLEWMGGIIPSFGTANYAQKFQGRVTITADEST |
| | | STAYMELSSLRSEDTAVYYCARGPIVATITPLDYWGQGT |
| | | LVTVSS |
| 393 | VH | QMQLVQSGAEVKKPGSSVKVSCKASGGTFSSYAYSWV |
| | | RQAPGQGLEWMGGIIPSFGTANYAQKFQGRVTITADEST |
| | | STAYMELSSLRSEDTAVYYCARGPIVATITPLDYWGQGT |
| | | LVTVSS |
| 394 | VH | QMQLVQSGAEVKKPGSSVKVSCKASGGTFSSYAYSWV |
| | | RQAPGQGLEWMGGIIPSFGTANYAQKFQGRVTITADEST |
| | | STAYMELSSLRSEDTAVYYCARGPIVATITPLDYWGQGT |
| | | LVTVSS |
| 395 | VH | QMQLVQSGAEVKKPGSSVKVSCKASGGTFSSYAISWVR |
| | | QAPGQGLEWMGGIIPAFGTANYAQKFQGRVTITADESTS |
| | | TAYMELSSLRSEDTAVYYCARGPIVATITPLDYWGQGTL |
| | | VTVSS |
| 396 | VL | SYELMQPPSVSVAPGKTATIACGGENIGRKTVHWYQQK |
| | | PGQAPVLVIYYDSDRPSGIPERFSGSNSGNTATLTISRVE |
| | | AGDEADYYCQVWDSSSDHRIFGGGTKLTVL |
| 397 | VL | AIRMTQSPSSLSASVGDRVTITCRASQSISSYLNWYQQKP |
| | | GKAPKLLIYTTSSLKSGVPSRFSGSGSGTDFTLTISRLQPE |
| | | DFATYYCQQSYSSTWTFGRGTKVEIK |
| 398 | VL | QSVLTQPPSVSAAPGQKVTISCSGNNSNIANNYVSWYQQ |
| | | LPGTAPKLLIYDNNYRPSGIPDRFSGSKSGTSATLDITGL |
| | | QTGDEADYYCGVWDGSLTTGVFGGGTKLTVL |
| 399 | VL | LPVLTQPASVSGSPGQSITISCTGTTSDIGGYDYVSWYQQ |
| | | HPGKAPKLMIYDVSKRPSGVSNRFSGSKSGNTASLTISG |
| | | LQAEDEADYYCSSYTSSSTHVFGTGTKLTVL |
| 400 | VL | QSALTQPASVSGSPGQSITSCTGTSSDVGGYNYVSWYQ |
| | | QHPGKAPKLMIYDVSNRPSGVSNRFSGSKSGNTASLTIS |
| | | GLQAEDEADYYCSSYRSSTLGPVFGGGTKLTVL |
| 401 | VL | QAGLTQPPSVSEAPRQRVTISCSGSSSNIGNNAVNWYQQ |
| | | PGKAPKLLIYYDDLLPSGVSDRFSGSKSGTSASLAISGL |
| | | QSEDEADYYCAAWDDSLNGYVFGTGTKLTVL |
| 402 | VL | QSALTQPRSVSGSPGQSVTISCTGTSSDVGGYNYVSWYQ |
| | | QHPGKAPKLMIYDVSKRPSGVPDRFSGSKSGNTASLTIS |
| | | GLQAEDEADYYCSSYTSSTTHVFGTGTKVTVL |
| 403 | VL | QSVVTQPPSVSAAPGQKVTISCSGSSSNIGNNYVSWYQQ |
| | | LPGTAPKLLIYDNNKRPSGIPDRESGSKSGTSATLGITGL |
| | | QTGDEADYYCGTWDSSLSVWVFGGGTQLTVL |
| 404 | VL | QSVLTQPASVSGSPGQSITISCTGTSSDVGGYNYVSWYQ |
| | | QHPGRAPRLMIYDVSNRPSGVSNRFSGSKSGNTASLTIS |
| | | GLQAEDEGDYYCSSYTSGGTLGPVFGGGTKLTVL |
| 405 | VL | QSVVTQPPSVSAAPGQKVTISCSGSSSNIGNNYVSWYQQ |
| | | LPGTAPKLLIYDNNKRPSGIPDRFSGSKSGTSATLGITGL |
| | | QTGDEADYYCGTWDSSLSAVVFGGGTKLTVL |
| 406 | VL | QSVVTQPPSVSAAPGQKVTISCSGSSSNIGNNYVSWYQQ |
| | | VPGTAPKLLIYDNNKRPSGIPDRESGSNSDTSATLGITGL |
| | | QTGDEADYYCGTWDSSLSAWVFGGGTKLTVL |
| 407 | VL | QSVVTQPPSVSAAPGQKVTISCSGSSSNIGNNYVSWYQQ |
| | | LPGTAPKLLIYDNNKRPSGIPDRFSGSKSGTSATLGITGL |
| | | QTGDEADYYCGTWDSSLSAGSVVFGGGTKLTVL |
| 408 | VL | SYELMQPPSVSVAPGKTATIACGGENIGRKTVHWYQQK |
| | | PGQAPVLVIYYDSDRPSGIPERFSGSNSGNTATLTISRVE |
| | | AGDEADYYCLVWDSSSDHRIFGGGTKLTVL |
| 409 | VL | SYELMQPPSVSVAPGKTATIACGGENIGRKTVHWYQQK |
| | | PGQAPVLVIYYDSDRPSGIPERFSGSNSGNTATLTISRVE |
| | | AGDEADYYCQVWDSSSDHRIFGGGTKLTVL |
| 410 | VL | SYELMQPPSVSVAPGKTATIACGGENIGRKTVHWYQQK |
| | | PGQAPVLVIYYDSDRPSGIPERFSGSNSGNTATLTISRVE |
| | | AGDEADYYCQVWDSSSDHRIFGGGTKLTVL |
| 411 | VL | SYELMQPPSVSVAPGKTATIACGGENIGRKTVHWYQQK |
| | | PGQAPVLVIYYDSDRPSGIPERFSGSNSGNTATLTISRVE |
| | | AGDEADYYCQVWDSSSDHRIFGGGTKLTVL |
| 412 | VH | QVQLVQSGSEVKKSGSSVKVSCKTSGGTFSITNYAINWV |
| | | RQAPGQGLEWMGGILPIFGAAKYAQKFQDRVTITADES |
| | | TNTAYLELSSLTSEDTAMYYCARGKRWLQSDLQYWGQ |
| | | GTLVTVSS |
| 413 | VL | QPVLTQPASVSGSPGQSITISCTGSSSDVGSYDLVSWYQQ |
| | | SPGKVPKLLIYEGVKRPSGVSNRFSGSKSGNTASLTISGL |
| | | QAEDEADYYCSSYAGTRNFVFGGGTQLTVL |
| 414 | VL CDR1 | RASQSISSYLN |
| 415 | C8 VL | KASRLQS |
| | CDR2 | |
| 416 | C8 VL | RALKPVT |
| | CDR3 | |
| 417 | VL CDR2 | AASSLQS |
| 418 | C12 VL | SYSTPNT |
| | CDR3 | |
| 419 | C16 VL | SASQLQS |
| | CDR2 | |
| 420 | C16 VL | ANSRPST |
| | CDR3 | |
| 421 | C20 VL | NASSLQS |
| | CDR2 | |
| 422 | C20 VL | YPYGPG |
| | CDR3 | |
| 423 | VL CDR2 | YASTLQS |
| 424 | VL CDR3 | DNGYPST |
| 425 | VH CDR1 | SYAMS |
| 426 | VH CDR2 | DITASGQRTTYADS |
| 427 | VH CDR3 | SKAIFDY |
| 428 | VH CDR2 | SINKDGHYTSYADS |
| 429 | VH CDR3 | NIDEFDY |
| 430 | VH CDR2 | SIMATGAGTLYADS |
| 431 | VH CDR3 | DGAGFDY |
| 432 | VH CDR2 | TITSSGAATYYADS |
| 433 | VH CDR3 | NYTGFDY |
| 434 | VH CDR2 | SIYSTGGATAYADS |
| 435 | VH CDR3 | SSAGFDY |
| 436 | VH CDR2 | SSIYSTGGATAYADS |
| 437 | VH CDR3 | SSAGQSRPGFDY |
| 438 | VH CDR3 | SSAGQSWPGFDY |
| 439 | VH CDR3 | SSAGQSFPGFDY |
| 440 | VH CDR3 | WSAAFDY |
| 441 | VH CDR3 | WSAGYDY |
| 442 | VH CDR3 | WSKGFDY |
| 443 | VH CDR2 | SSIWKQGIVTVYDS |
| 444 | VH CDR2 | SSIWRNGIVTVYDS |
| 445 | VH CDR2 | SDIWKQGMVTVYDS |
| 446 | VH CDR2 | SSIWRQGLATAYDS |
| 447 | VH CDR2 | SEIVATGILTSYDS |
| 448 | VH CDR2 | SSIGRQGLITVYDS |
| 449 | VH CDR2 | SSIWYQGLVTVYDS |
| 450 | VH CDR2 | SDIWKQGFATADS |
| 451 | VH CDR2 | SSIWRNGIVTVYADS |
| 452 | VH CDR2 | SSIWYQGLVTVYADS |
| 453 | VH CDR3 | DYFYGMDV |
| 454 | VH CDR3 | KFHFVSGSPFGMDV |
| 455 | VH CDR3 | ERIQLWFDY |
| 456 | VH CDR3 | DQGIAAALFDY |
| 457 | VH CDR3 | PFDY |
| 458 | VH CDR3 | KYDYVSGSPFGMDV |
| 459 | VH CDR3 | DSSGWSRYYMDV |
| 460 | VH CDR3 | KYSYVSGSPFGMDV |
| 461 | VH CDR3 | GRFRYFDWFLDY |
| 462 | VH CDR3 | DYFWSGFSAFDI |
| 463 | VL CDR3 | QQRSNWPRT |
| 464 | VL CDR3 | QQRSNWPT |
| 465 | VL CDR3 | QQYNSYPYT |
| 466 | VL CDR3 | QQYGSSPWT |
| 467 | VL CDR3 | QQYGSSP |
| 468 | VL CDR3 | QQFNSYPFT |
| 469 | VL CDR3 | QQSYSTPWT |
| 470 | VH CDR2 | WITAYNGNTNYAQKLQG |
| 471 | VH CDR2 | GIIPIFGKAHYAQKFQG |
| 472 | VH CDR2 | WLHADTGITKFSQKFQG |
| 473 | VH CDR2 | GIIPIFGTANHAQKFQG |
| 474 | VH CDR2 | GISGNSGNIGYADSVKG |
| 475 | VH CDR2 | GIIPIFGRAHYAQKFQG |
| 476 | VH CDR2 | GIIPIFGSANYAQKFQD |
| 477 | VH CDR2 | GIIPLFGIAHYAQKFQG |
| 478 | VH CDR2 | GISWNRGRIEYADSVKG |
| 479 | VL CDR2 | DASNRAT |
| 480 | VL CDR2 | GASSRAT |
| 481 | VL CDR2 | DASSLES |
| 482 | VL CDR2 | KASTLES |
| 483 | VH CDR1 | DYGFS |
| 484 | VH CDR1 | TYAIS |
| 485 | VH CDR1 | SYDVH |
| 486 | VH CDR1 | TYAIN |
| 487 | VH CDR1 | DYVVH |
| 488 | VH CDR1 | SYAIS |
| 489 | VH CDR1 | SYAIN |
| 490 | VH CDR1 | DYGMH |
| 491 | VL CDR1 | RASQSVSSYLV |
| 492 | VL CDR1 | RASQSVSSYLA |
| 493 | VL CDR1 | RASQGISSWLA |
| 494 | VL CDR1 | RASQSVSSSYLA |
| 495 | VL CDR1 | RASQGISSALA |
| 496 | VH CDR1 | TYSMN |
| 497 | VH CDR2 | SISSSGDYIYYADSVK |
| 498 | VH CDR3 | DLVTSMVAFDY |
| 499 | VL CDR1 | SGDALPQKYVF |
| 500 | VL CDR2 | EDSKRPS |
| 501 | VL CDR3 | YSTDRSGNHRV |
| 502 | VH CDR1 | RYWMS |
| 503 | VH CDR2 | NIKQDGSEKYYVDSVKG |
| 504 | VH CDR3 | EGGWFGELAFDY |
| 505 | VL CDR1 | RASQRVSSSYLA |
| 506 | VL CDR2 | DASSRAT |
| 507 | VL CDR3 | QQYGSLPWT |
| 508 | VH CDR1 | SWYMS |
| 509 | VH CDR2 | NIKQDGGEQYYVDSVK |
| 510 | VH CDR3 | DWNYGYYDMDV |
| 511 | VL CDR1 | RASQSVSSNYLA |
| 512 | VL CDR2 | GTSSRAT |
| 513 | VL CDR3 | QQYGSSIFT |
| 514 | VL CDR1 | RASQxxxPxxA |
| 515 | VL CDR2 | SASxLxS |
| 516 | VL CDR3 | QQxxxxPxT |
| 517 | VH CDR1 | GFTFSxSWIH |
| 518 | VH CDR2 | AWIxPYGGSxYYADSVKG |
| 519 | VH CDR3 | RHWPGGFDY |
| 520 | VL CDR1 | RASQDVSTAVA |
| 521 | VL CDR2 | SASFLYS |
| 522 | VL CDR3 | QQYLYHPAT |
| 523 | VH CDR1 | GFTFSDSWIH |
| 524 | VH CDR2 | AWISPYGGSTYYADSVKG |
| 525 | VL CDR1 | KSSQSLLxxxTRKNYLA |
| 526 | VL CDR2 | WASTRES |
| 527 | VL CDR3 | xQSYDVVT |
| 528 | VH CDR1 | SYWxH |
| 529 | VH CDR2 | YINPSSxYxEYxxKFxD |
| 530 | VH CDR3 | SGWLxHGDYYFDx |
| 531 | VL CDR1 | KSSQSLLNSRTRKNYLA |
| 532 | VL CDR3 | QQSYDVVT |
| 533 | VH CDR1 | SYWMH |
| 534 | VH CDR2 | YINPSSDYNEYSEKFMD |
| 535 | VH CDR3 | SGWLVHGDYYFDY |
| 536 | VL CDR1 | KSSQSLLHTSTRKNYLA |
| 537 | VL CDR3 | KQSYDVVT |
| 538 | VH CDR1 | GYIFTSYWMH |
| 539 | VH CDR2 | YINPSSGYHEYNQKFID |
| 540 | VH CDR3 | SGWLIHGDYYFDF |
| 541 | VH CDR1 | SYWIH |
| 542 | VH CDR1 | GTTFTSYWIH |
| 543 | VL CDR1 | TGTxxDVGxYNYVS |
| 544 | VL CDR2 | xVxxRPS |
| 545 | VL CDR3 | SSxTxxxxRV |
| 546 | VH CDR1 | xYxMx |
| 547 | VH CDR2 | SIYPSGGxTFYADxVK |
| 548 | VH CDR3 | IKLGTVTTVxY |
| 549 | VL CDR1 | TGTSSDVGGYNYVS |
| 550 | VL CDR2 | DVSNRPS |
| 551 | VL CDR3 | SSYTSSSTRV |
| 552 | VH CDR1 | SYIMM |
| 553 | VH CDR2 | SIYPSGGITFYADTVKG |
| 554 | VH CDR3 | IKLGTVTTVDY |
| 555 | VH CDR1 | MYMMM |
| 556 | VH CDR2 | SIYPSGGITFYADTVKG |
| 557 | VH CDR3 | TGTSSDVGAYNYVS |
| 558 | VL CDR1 | xxSxSLLYSSxxXxxxx |
| 559 | VL CDR2 | Xxxxxx |
| 560 | VL CDR3 | xQXxxxPxT |
| 561 | VH CDR1 | GxxxxxxxxN |
| 562 | VH CDR2 | XxXxxxxxTxxNxxKx |
| 563 | VH CDR3 | xxxXXXXx |
| 564 | VL CDR1 | RASSSVSYIY |
| 565 | VL CDR2 | ATFNLAS |
| 566 | VL CDR3 | HQRSSYPWT |
| 567 | VH CDR1 | GYTFPDYYMN |
| 568 | VH CDR2 | DIDPNYGGTTYNQKFKG |
| 569 | VL CDR1 | SASSSIRYMH |
| 570 | VL CDR2 | DTSKLTS |
| 571 | VL CDR3 | QQDSSYPLT |
| 572 | VH CDR1 | GYTFTSYDIN |
| 573 | VH CDR2 | WIFPRDNNTKYNENFKG |
| 574 | VH CDR3 | ENWVGDF |
| 575 | VL CDR1 | KASQDVGTAVA |
| 576 | VL CDR2 | WASTRHT |
| 577 | VL CDR3 | QQYYGYPLT |
| 578 | VH CDR1 | GYSITSDYWN |
| 579 | VH CDR2 | YISYTGSTYYNPSLKS |
| 580 | VH CDR3 | YGGWLSPF |
| 581 | VL CDR1 | KSSQSLLYSSNQKNSL |
| 582 | VH CDR1 | GYSIISDYWN |
| 583 | VH CDR3 | RGGWLLPF |
| 584 | VH CDR1 | GFSLTTYSIN |
| 585 | VH CDR2 | VMWAGGGTNSNSVLKS |
| 586 | VH CDR3 | YYGNSPYYAI |
| 587 | VL CDR1 | TRSSGSIGSNYVQ |
| 588 | VL CDR2 | EDNQRPS |
| 589 | VL CDR3 | QSYDSSTWVI |
| 590 | VH CDR2 | WISPIGGSTNYAQKVQG |
| 591 | VH CDR3 | GLXXXXXXXXXXXXXXXDV |
| 592 | VL CDR1 | TRSSGNIASNYVQ |
| 593 | VL CDR2 | GKNNRPS |
| 594 | VL CDR3 | QSYDSSNLWV |
| 595 | VH CDR1 | SYGIS |
| 596 | VH CDR2 | WISAYNGNTNYAQKLED |
| 597 | VH CDR3 | ALPSGTILNGGWFDP |
| 598 | VL CDR1 | QGDSLRSYYAS |
| 599 | VL CDR2 | SDRDRPS |
| 600 | VL CDR3 | NSRDSSGNHYV |
| 601 | VH CDR1 | SYALS |
| 602 | VH CDR2 | AISGGGGSTYYADSVKD |
| 603 | VH CDR3 | DVFPETFSMNYGMDV |
| 604 | VL CDR1 | GGSDIGRKSVH |
| 605 | VL CDR3 | QVWDNNSDHYV |
| 606 | VH CDR1 | DYAMH |
| 607 | VH CDR2 | LISGDGGSTYYADSVKD |
| 608 | VH CDR3 | VLLPCSSTSCYGSVGAFDI |
| 609 | VL CDR3 | SSYTSSTLP |
| 610 | VH CDR1 | NYDMS |
| 611 | VH CDR2 | RVNWNGGSTTYADAVKD |
| 612 | VH CDR3 | EFVGAYDL |
| 613 | VL CDR1 | RASQSIGNSLA |
| 614 | VL CDR2 | AASTLQS |
| 615 | VL CDR3 | QQHTIPTFS |
| 616 | VH CDR1 | GLYIH |
| 617 | VH CDR2 | WIIPIFGTANYAQKFED |
| 618 | VH CDR3 | GLRWGIWGWFDP |
| 619 | VL CDR1 | RASQGIGSYLA |
| 620 | VL CDR2 | QDIKRPS |
| 621 | VL CDR3 | QQLNNYPIT |
| 622 | VH CDR1 | DNAIS |
| 623 | VH CDR2 | WIIPIFGKPNYAQKFED |
| 624 | VH CDR3 | TMVRGFLGVMDV |
| 625 | VL CDR1 | SGDKLGNKYAY |
| 626 | VL CDR2 | EDYRRPS |
| 627 | VL CDR3 | QTWDNSVV |
| 628 | VH CDR2 | AISGSGGSTYYADSVKD |
| 629 | VH CDR3 | DQFVTIFGVPRYGMDV |
| 630 | VL CDR1 | TRSSGSIDSNYVQ |
| 631 | VL CDR2 | DDSDRPS |
| 632 | VL CDR3 | QSYDSNNRHVI |
| 633 | VH CDR1 | TYALN |
| 634 | VH CDR2 | RIVPLIGLVNYAHNFED |
| 635 | VH CDR3 | GRQMFGAGIDF |
| 636 | VL CDR1 | TRSSGNIGTNYVQ |
| 637 | VL CDR2 | EDNKRPS |
| 638 | VL CDR3 | QSYHSSGWE |
| 639 | VH CDR1 | SHGIT |
| 640 | VH CDR2 | WISAHNGHASNAQKVED |
| 641 | VH CDR3 | EVYGGNSDY |
| 642 | VL CDR1 | GGNNIGSKGVH |
| 643 | VL CDR2 | YKSDSNKQQAS |
| 644 | VL CDR3 | QVWDSSSDHWV |
| 645 | VH CDR1 | RHGMH |
| 646 | VH CDR2 | VISHDGSVKYYADSMKD |
| 647 | VH CDR3 | VHAALYYGMDV |
| 648 | VL CDR1 | TRSSGSIASNYVQ |
| 649 | VL CDR3 | QSYDSTTPSV |
| 650 | VH CDR2 | WTSPHNGLTAFAQILED |
| 651 | VH CDR3 | GLSYQVSGWFDP |
| 652 | VL CDR1 | TRSSGSIASHYVQ |
| 653 | VL CDR3 | QSYDGITVI |
| 654 | VH CDR2 | RIIPILGIANYAQKFED |
| 655 | VH CDR3 | VHPVFSYALDV |
| 656 | VL CDRQ | TLRSGLNVGSYRIY |
| 657 | VL CDR3 | QSYDSSNRWV |
| 658 | VH CDR1 | TYAFS |
| 659 | VH CDR2 | WISAYNGNTNYAQKVED |
| 660 | VH CDR3 | DGYGSDPVL |
| 661 | VL CDR3 | MIWYSSAVV |
| 662 | VH CDR1 | NYGIS |
| 663 | VH CDR3 | GDFRKPFDY |
| 664 | VL CDR1 | RATESVEYYGTSLVQ |
| 665 | VL CDR2 | AASSVDS |
| 666 | VL CDR3 | QQSRRVPYT |
| 667 | VH CDR1 | SYVMH |
| 668 | VH CDR2 | YVNPFNDGTKYNEMFKG |
| 669 | VH CDR3 | QAWGYP |
| 670 | VL CDR1 | QSISNW |
| 671 | VL CDR3 | QQYHSYSYT |
| 672 | VH CDR1 | GFTFSRFW |
| 673 | VH CDR2 | INQDGTEK |
| 674 | VH CDR3 | ANTYYDFWSGHFDY |
| 675 | VL CDR1 | QGIRND |
| 676 | VL CDR3 | LQHNSYPLT |
| 677 | VH CDR1 | GFTFSNFG |
| 678 | VH CDR2 | LWSDGSNK |
| 679 | VH CDR3 | ARGRGAPGIPIFGY |
| 680 | VL CDR3 | LQHNNYPYT |
| 681 | VH CDR1 | GFTFSNAW |
| 682 | VH CDR2 | IKRKTDGGTT |
| 683 | VH CDR3 | TTDDIVVVPAVMREYYGMDV |
| 684 | VL CDR1 | QTLVHGDGNTY |
| 685 | VL CDR3 | MQATHFPIT |
| 686 | VH CDR1 | GYSFTGYY |
| 687 | VH CDR2 | INPNSGTK |
| 688 | VH CDR3 | ARDEDWNFGSWFDS |
| 689 | VL CDR1 | PSLVHSDGNTY |
| 690 | VH CDR1 | GYTFTGYY |
| 691 | VH CDR2 | LNPNTGTT |
| 692 | VH CDR3 | ARDEDWNYGSWFDT |
| 693 | VL CDR1 | QSINSY |
| 694 | VL CDR3 | QQSYSTPPIT |
| 695 | VH CDR1 | GFTFDDYG |
| 696 | VH CDR2 | IHWHGKRT |
| 697 | VH CDR3 | VRGGMSTGDWFDP |
| 698 | VL CDR1 | QSISSY |
| 699 | VH CDR2 | IHWSGRST |
| 700 | VH CDR3 | ARGGMSTGDWFDP |
| 701 | VL CDR1 | QTINIY |
| 702 | VL CDR3 | HQSYSTPPIT |
| 703 | VH CDR1 | GFTVGSNY |
| 704 | VH CDR2 | IYSGGST |
| 705 | VH CDR3 | ARGIRGLDV |
| 706 | VL CDR1 | QSFNFNY |
| 707 | VL CDR3 | QQYESAPWT |
| 708 | VH CDR1 | GGIFSSST |
| 709 | VH CDR2 | IIPVFGTV |
| 710 | VH CDR3 | ARNWGLGSFYI |
| 711 | VL CDR3 | QQSYCTPPIT |
| 712 | VH CDR1 | GFPFDEYA |
| 713 | VH CDR2 | ISWSNNNI |
| 714 | VH CDR3 | AKSGIFDS |
| 715 | VH CDR1 | GFTFSSYG |
| 716 | VH CDR2 | ISYEGRNK |
| 717 | VH CDR3 | AKDRTLYGMDV |
| 718 | VL CDR1 | QVISNY |
| 719 | VL CDR3 | QKYNSAPRT |
| 720 | VH CDR1 | GFSLSTNRMC |
| 721 | VH CDR2 | IDWDGVK |
| 722 | VH CDR3 | ARSTSLTFYYFDY |
| 723 | VL CDR1 | QNINNY |
| 724 | VL CDR3 | QQSYNTPLT |
| 725 | VH CDR1 | EFTVGTNH |
| 726 | VH CDR2 | IYSGGNT |
| 727 | VH CDR3 | ARGLGGMDV |
| 728 | VL CDR1 | QTISTY |
| 729 | VL CHR3 | LQHNSYPYT |
| 730 | VH CDR1 | GFTFSKYW |
| 731 | VH CDR2 | IKGDGSEK |
| 732 | VH CDR3 | ARDYWGSGYYFDF |
| 733 | VL CDR3 | QQSYSTPFT |
| 734 | VH CDR1 | GFTFSSYW |
| 735 | VH CDR2 | IKQDGSEK |
| 736 | VH CDR3 | ARDDIVVVPAPMGYYYYYFGMDV |
| 737 | VH CDR1 | GFTFDDFA |
| 738 | VH CDR2 | ISWTGGNM |
| 739 | VH CDR3 | VKDIRGIVATGGAFDI |
| 740 | VH CDR1 | GFTVGTNY |
| 741 | VH CDR3 | ARGIRGFDI |
| 742 | VH CDR1 | GFTISTNY |
| 743 | VH CDR2 | IYSSGST |
| 744 | VH CDR1 | GFTIDDSA |
| 745 | VH CDR2 | ISWKSGSI |
| 746 | VH CDR3 | VKDIRGNWNYGGNWFDP |
| 747 | VH CDR1 | GFTVGVNH |
| 748 | VH CDR2 | IFSSGRT |
| 749 | VH CDR3 | ARGIGGLDI |
| 750 | VH CDR1 | GFTFDDYA |
| 751 | VH CDR2 | ISWTGGTI |
| 752 | VH CDR3 | TRDIRGNWKYGGWFDP |
| 753 | VH CDR1 | GYTFTAYY |
| 754 | VH CDR2 | ISPNSGFT |
| 755 | VH CDR3 | AREGSTHHNSFDP |
| 756 | VH CDR1 | GFTVGTNF |
| 757 | VH CDR2 | IIPILGAA |
| 758 | VH CDR3 | ARGGGMDV |
| 759 | VH CDR1 | GGTFNTYV |
| 760 | VH CDR2 | ISPYNGYT |
| 761 | VH CDR3 | ARDRTSGGFDP |
| 762 | VH CDR1 | GYIFTHYG |
| 763 | VH CDR3 | SRGRGPYWSFDL |
| 764 | VL CDR1 | QASESVYSNNYLS |
| 765 | VL CDR2 | LASTLAS |
| 766 | VL CDR3 | IGGKSSSTDGNA |
| 767 | VH CDR1 | SNGLT |
| 768 | VH CDR2 | TINKDASAYYASWAKG |
| 769 | VH CDR3 | IAFKTGTSI |
| 770 | VL CDR1 | RSSKSLLHSNGITYLY |
| 771 | VL CDR2 | QMSNLAS |
| 772 | VL CDR3 | AQNLEPPLT |
| 773 | VH CDR1 | DYYTH |
| 774 | VH CDR2 | WIDPENGKTAYAPKFQG |
| 775 | VH CDR3 | GGYDVYFLDY |
| 776 | VL CDR1 | KASQDVGIVVA |
| 777 | VL CDR2 | WASIRHT |
| 778 | VL CDR3 | QQYSNYPLYT |
| 779 | VH CDR1 | GFSLTSYGVH |
| 780 | VH CDR2 | VIWAGGSTNYNSALMS |
| 781 | VH CDR3 | AKPYGNSAMDY |
| 782 | VH CDR2 | VIWAGGSTNYVDSVKG |
| 783 | VH CDR3 | AKPYGTSAMDY |
| 784 | VH CDR3 | VIWAGGSTNYADSVKG |
| 785 | VL CDR1 | ASQSVSTSSSSFMH |
| 786 | VL CDR2 | YASNLES |
| 787 | VL CDR3 | QHSWEIPYT |
| 788 | VH CDR1 | SYGMS |
| 789 | VH CDR2 | SISSGGSTYYPDSVKG |
| 790 | VH CDR3 | GYDSGFAY |
| 791 | VL CDR1 | RASWSVSTSSSSYMH |
| 792 | VH CDR2 | SISSGGYTYYPDSVKG |
| 793 | VL CDR1 | KASQSVSNDVA |
| 794 | VL CDR2 | YAANRYT |
| 795 | VL CDR3 | QQDYTSPYT |
| 796 | VH CDR1 | TYGVH |
| 797 | VH CDR2 | VIWRGVYYDYNAAFMAS |
| 798 | VH CDR3 | LGFYAMDY |
| 799 | VL CDR1 | KASQSVSNDVG |
| 800 | VL CDR2 | YASNRYS |
| 801 | VH CDR1 | SYGVH |
| 802 | VH CDR2 | VIWSGGVTDYNAAFIS |
| 803 | VL CDR2 | RSSQIIVHSNANTYLE |
| 804 | VL CDR2 | KVSNRFS |
| 805 | VL CDR3 | FQGSHVPYT |
| 806 | VH CDR1 | TYWMH |
| 807 | VH CDR2 | QINPDSTTINTAPSLKD |
| 808 | VH CDR3 | PGDYGYDFDC |
| 809 | VL CDR1 | SASSSVSSSYLY |
| 810 | VL CDR2 | NTSNLAS |
| 811 | VL CDR3 | HQWRSYPPT |
| 812 | VH CDR1 | SGYWN |
| 813 | VH CDR2 | YISYSGSTYYNPSLKS |
| 814 | VH CDR3 | SLLWFSTGFAY |
| 815 | VL CDR1 | SANSSVSYMH |
| 816 | VL CDR2 | DTSKLAS |
| 817 | VL CDR3 | QQWSSNPWT |
| 818 | VH CDR2 | YYWSGGITDYNAAFKS |
| 819 | VL CDR1 | RASQSVSTSSYSYMH |
| 820 | VL CDR3 | QNSWEIPYT |
| 821 | VH CDR1 | STGMS |
| 822 | VH CDR2 | SISSGGTTYYLGSVQG |
| 823 | VH CDR3 | GYDAGFAY |
| 824 | VL CDR1 | KSSQSLLYSSNQKNSLA |
| 825 | VL CDR2 | WASNRES |
| 826 | VL CDR3 | QQYYSYPLT |
| 827 | VH CDR1 | SGYWT |
| 828 | VH CDR2 | YIYTGSLLYNPSLKS |
| 829 | VH CDR3 | QRDWLGFAY |
| 830 | VL CDR1 | RASQSVSTSSYSYVH |
| 831 | VH CDR2 | SISSGGSIYYPDSVKG |
| 832 | VH CDR3 | GYDAGFAF |
| 833 | VH CDR1 | GFTFSMYMMM |
| 834 | VH CDR1 | GFTFSAYAMA |
| 835 | VH CDR1 | GFTFSAYRMF |
| 836 | VH CDR1 | GFTFSAYLMV |
| 837 | VH CDR1 | GFTFSAYVMF |
| 838 | VH CDR1 | GFTFSAYVMS |
| 839 | VH CDR1 | GFTFSGYLMV |
| 840 | VH CDR1 | GFTFSGYQML |
| 841 | VH CDR1 | GFTFSGYSMF |
| 842 | VH CDR1 | GFTFSGYWMA |
| 843 | VH CDR1 | GFTFSQYLMY |
| 844 | VH CDR1 | GFTFSQYVMF |
| 845 | VH CDR1 | GFTFSQYYMY |
| 846 | VH CDR1 | GFTFSSYLMS |
| 847 | VH CDR1 | GFTFSSYLMT |
| 848 | VH CDR1 | GFTFSSYQMV |
| 849 | VH CDR1 | GFTFSSYSMA |
| 850 | VH CDR1 | GFTFSSYVMF |
| 851 | VH CDR1 | GFTFSSYVMS |
| 852 | VH CDR1 | GFTFSSYVMY |
| 853 | VH CDR1 | GFTFSSYYMF |
| 854 | VH CDR1 | GFTFSSYYMV |
| 855 | VH CDR1 | GFTFSYYSMV |
| 856 | VH CDR1 | GFTFSWYLMA |
| 857 | VH CDR1 | GFTFSWYQMS |
| 858 | Spacer + | CAAGGTCAGTCTGGATCCTATTGCGAGGTTAGTGAGC |
| | PL01-0003 | TGTTTGTTCTTCCTTGGTGCATGGGTGGAGGTGGCTCG |
| | LC | AGCGGTGGCAGCGGTGGCTCTGGTGGTACTAGCACCT |
| | (nucleotide | CTGGTCGTTCCGCTAACCCACGTGGCGGCGGTTCTGA |
| | sequence) | CATCCAGATGACCCAGAGCCCCAGCAGCCTGTCTGCT |
| | | AGCGTGGGCGACAGAGTGACCATCACCTGTAGAGCC |
| | | AGCCAGAGCATCAGCAGCTACCTGAACTGGTATCAGC |
| | | AGAAGCCCGGCAAGGCCCCCAAACTGCTGATCTACGC |
| | | CGCCAGCTCTCTGCAGTCTGGCGTGCCCAGCAGATTT |
| | | TCCGGCAGCGGCTCTGGCACCGACTTCACCCTGACCA |
| | | TCAGCTCCCTGCAGCCCGAGGACTTCGCCACCTACTA |
| | | CTGCCAGCAGGACAACGGCTACCCCAGCACCTTTGGC |
| | | GGAGGTACCAAGGTGGAAATCAAGCGTTGTGAGGCC |
| | | ACTCACAAGACATCAACTTCACCCATTGTCAAGAGCT |
| | | TCAACAGGAATGAGTGT |
| 859 | Spacer + | QGQSGSYCEVSELFVLPWCMGGGGSSGGSGGSGGTSTS |
| | PL01-0003 | GRSANPRGGGSDIQMTQSPSSLSASVGDRVTITCRASQSI |
| | LC (amino | SSYLNWYQQKPGKAPKLLIYAASSLQSGVPSRFSGSGSG |
| | acid | TDFTLTISSLQPEDFATYYCQQDNGYPTSTFGGGTKVEIKR |
| | sequence) | |
| 860 | PL01-0003 | TATTGCGAGGTTAGTGAGCTGTTTGTTCTTCCTTGGTG |
| | LC | CATGGGTGGAGGTGGCTCGAGCGGTGGCAGCGGTGG |
| | nucleotide | CTCTGGTGGTACTAGCACCTCTGGTCGTTCCGCTAACC |
| | sequence | CACGTGGCGGCGGTTCTGACATCCAGATGACCCAGAG |
| | | CCCCAGCAGCCTGTCTGCTAGCGTGGGCGACAGAGTG |
| | | ACCATCACCTGTAGAGCCAGCCAGAGCATCAGCAGCT |
| | | ACCTGAACTGGTATCAGCAGAAGCCCGGCAAGGCCCC |
| | | CAAACTGCTGATCTACGCCGCCAGCTCTCTGCAGTCT |
| | | GGCGTGCCCAGCAGATTTTCCGGCAGCGGCTCTGGCA |
| | | CCGACTTCACCCTGACCATCAGCTCCCTGCAGCCCGA |
| | | GGACTTCGCCACCTACTACTGCCAGCAGGACAACGGC |
| | | TACCCCAGCACCTTTGGCGGAGGTACCAAGGTGGAAA |
| | | TCAAGCGTTGTGAGGCCACTCACAAGACATCAACTTC |
| | | ACCCATTGTCAAGAGCTTCAACAGGAATGAGTGT |
| 861 | PL01-0003 | YCEVSELFVLPWCMGGGGSSGGSGGSGGTSTSGRSANP |
| | LC amino | RGGGSDIQMTQSPSSLSASVGDRVTITCRASQSISSYLNW |
| | acid | YQQKPGKAPKLLIYAASSLQSGVPSRFSGSGSGTDFTLTI |
| | sequence | SSLQPEDFATYYCQQDNGYPSTFGGGTKVEIKR |
| 862 | Spacer + | CAAGGTCAGTCTGGATCCTCTTGCCTTATGCATCCGCA |
| | PL02-0003 | TTATGCTCATGATTATTGCTATGTTGGAGGTGGCTCGA |
| | LC | GCGGTGGCAGCGGTGGCTCTGGTGGTACTAGCACCTC |
| | (nucleotide | TGGTCGTTCCGCTAACCCACGTGGCGGCGGTTCTGAC |
| | sequence) | ATCCAGATGACCCAGAGCCCCAGCAGCCTGTCTGCTA |
| | | GCGTGGGCGACAGAGTGACCATCACCTGTAGAGCCA |
| | | GCCAGAGCATCAGCAGCTACCTGAACTGGTATCAGCA |
| | | GAAGCCCGGCAAGGCCCCCAAACTGCTGATCTACGCC |
| | | GCCAGCTCTCTGCAGTCTGGCGTGCCCAGCAGATTTT |
| | | CCGGCAGCGGCTCTGGCACCGACTTCACCCTGACCAT |
| | | CAGCTCCCTGCAGCCCGAGGACTTCGCCACCTACTAC |
| | | TGCCAGCAGGACAACGGCTACCCCAGCACCTTTGGCG |
| | | GAGGTACCAAGGTGGAAATCAAGCGTTGTGAGGCCA |
| | | CTCACAAGACATCAACTTCACCCATTGTCAAGAGCTT |
| | | CAACAGGAATGAGTGT |
| 863 | Spacer + | QGQSGSSCLMHPHYAHDYCYVGGGSSGGSGGSGGTSTS |
| | PL02-0003 | GRSANPRGGGSDIQMTQSPSSLSASVGDRVTITCRASQSI |
| | LC (amino | SSYLNWYQQKPGKAPKLLIYAASSLQSGVPSRFSGSGSG |
| | acid | TDFTLTISSLQPEDFATYYCQQDNGYPSTFGGGTKVETKR |
| | sequence) | |
| 864 | PL02-0003 | TCTTGCCTTATGCATCCGCATTATGCTCATGATTATTG |
| | LC | CTATGTTGGAGGTGGCTCGAGCGGTGGCAGCGGTGGC |
| | nucleotide | TCTGGTGGTACTAGCACCTCTGGTCGTTCCGCTAACCC |
| | sequence | ACGTGGCGGCGGTTCTGACATCCAGATGACCCAGAGC |
| | | CCCAGCAGCCTGTCTGCTAGCGTGGGCGACAGAGTGA |
| | | CCATCACCTGTAGAGCCAGCCAGAGCATCAGCAGCTA |
| | | CCTGAACTGGTATCAGCAGAAGCCCGGCAAGGCCCCC |
| | | AAACTGCTGATCTACGCCGCCAGCTCTCTGCAGTCTG |
| | | GCGTGCCCAGCAGATTTTCCGGCAGCGGCTCTGGCAC |
| | | CGACTTCACCCTGACCATCAGCTCCCTGCAGCCCGAG |
| | | GACTTCGCCACCTACTACTGCCAGCAGGACAACGGCT |
| | | ACCCCAGCACCTTTGGCGGAGGTACCAAGGTGGAAAT |
| | | CAAGCGTTGTGAGGCCACTCACAAGACATCAACTTCA |
| | | CCCATTGTCAAGAGCTTCAACAGGAATGAGTGT |
| 865 | PL02-0003 | SCLMHPHYAHDYCYVGGGSSGGSGGSGGTSTSGRSANP |
| | LC amino | RGGGSDIQMTQSPSSLSASVGDRVTITCRASQSISSYLNW |
| | acid | YQQKPGKAPKLLIYAASSLQSGVPSRFSGSGSGTDFTLTI |
| | sequence | SSLQPEDFATYYCQQDNGYPSTFGGGTKVEIKR |
| 866 | Spacer + | CAAGGTCAGTCTGGATCCTTGTGCGAGGTTTTGATGTT |
| | PL03-0003 | GTTGCAGCATCCGTGGTGCATGGGGGGAGGTGGCTCG |
| | LC | AGCGGTGGCAGCGGTGGCTCTGGTGGTACTAGCACCT |
| | (nucleotide | CTGGTCGTTCCGCTAACCCACGTGGCGGCGGTTCTGA |
| | sequence) | CATCCAGATGACCCAGAGCCCCAGCAGCCTGTCTGCT |
| | | AGCGTGGGCGACAGAGTGACCATCACCTGTAGAGCC |
| | | AGCCAGAGCATCAGCAGCTACCTGAACTGGTATCAGC |
| | | AGAAGCCCGGCAAGGCCCCCAAACTGCTGATCTACGC |
| | | CGCCAGCTCTCTGCAGTCTGGCGTGCCCAGCAGATTT |
| | | TCCGGCAGCGGCTCTGGCACCGACTTCACCCTGACCA |
| | | TCAGCTCCCTGCAGCCCGAGGACTTCGCCACCTACTA |
| | | CTGCCAGCAGGACAACGGCTACCCCAGCACCTTTGGC |
| | | GGAGGTACCAAGGTGGAAATCAAGCGTTGTGAGGCC |
| | | ACTCACAAGACATCAACTTCACCCATTGTCAAGAGCT |
| | | TCAACAGGAATGAGTGT |
| 867 | Spacer + | QGQSGSLCEVLMLLQHPWCMGGGGSSGGSGGSGGTST |
| | PL03-0003 | SGRSANPRGGGSDIQMTQSPSSESASVGDRVITTCRASQS |
| | LC (amino | ISSYLNWYQQKPGKAPKLLIYAASSLQSGVPSRFSGSGS |
| | acid | GTDFTLTISSLQPEDFATYYCQQDNGYPSTFGGGTKVEI |
| | sequence) | KR |
| 868 | PL03-0003 | TTGTGCGAGGTTTTGATGTTGTTGCAGCATCCGTGGTG |
| | LC | CATGGGGGGAGGTGGCTCGAGCGGTGGCAGCGGTGG |
| | nucleotide | CTCTGGTGGTACTAGCACCTCTGGTCGTTCCGCTAACC |
| | sequence | CACGTGGCGGCGGTTCTGACATCCAGATGACCCAGAG |
| | | CCCCAGCAGCCTGTCTGCTAGCGTGGGCGACAGAGTG |
| | | ACCATCACCTGTAGAGCCAGCCAGAGCATCAGCAGCT |
| | | ACCTGAACTGGTATCAGCAGAAGCCCGGCAAGGCCCC |
| | | CAAACTGCTGATCTACGCCGCCAGCTCTCTGCAGTCT |
| | | GGCGTGCCCAGCAGATTTTCCGGCAGCGGCTCTGGCA |
| | | CCGACTTCACCCTGACCATCAGCTCCCTGCAGCCCGA |
| | | GGACTTCGCCACCTACTACTGCCAGCAGGACAACGGC |
| | | TACCCCAGCACCTTTGGCGGAGGTACCAAGGTGGAAA |
| | | TCAAGCGTTGTGAGGCCACTCACAAGACATCAACTTC |
| | | ACCCATTGTCAAGAGCTTCAACAGGAATGAGTGT |
| 869 | PL03-0003 | LCEVLMLLQHPWCMGGGGSSGGSGGSGGTSTSGRSANP |
| | LC amino | RGGGSDIQMTQSPSSLSASVGDRVTITCRASQSISSYLNW |
| | acid | YQQKPGKAPKLLIYAASSLQSGVPSRFSGSGSGTDFTLTI |
| | sequence | SSLQPEDFATTYCQQDNGYPSTFGGGTKVEIKR |
| 870 | Spacer + | CAAGGTCAGTCTGGATCCATTGCGTGCCGGCATTTA |
| | PL04-0003 | TGGAGCAGTTGCCGTTTTGCCATCATGGAGGTGGCTC |
| | LC | GAGCGGTGGCAGCGGTGGCTCTGGTGGTACTAGCACC |
| | (nucleotide | TCTGGTCGTTCCGCTAACCCACGTGGCGGCGGTTCTG |
| | sequence) | ACATCCAGATGACCCAGAGCCCCAGCAGCCTGTCTGC |
| | | TAGCGTGGGCGACAGAGTGACCATCACCTGTAGAGCC |
| | | AGCCAGAGCATCAGCAGCTACCTGAACTGGTATCAGC |
| | | AGAAGCCCGGCAAGGCCCCCAAACTGCTGATCTACGC |
| | | CGCCAGCTCTCTGCAGTCTGGCGTGCCCAGCAGATTT |
| | | TCCGGCAGCGGCTCTGGCACCGACTTCACCCTGACCA |
| | | TCAGCTCCCTGCAGCCCGAGGACTTCGCCACCTACTA |
| | | CTGCCAGCAGGACAACGGCTACCCCAGCACCTTTGGC |
| | | GGAGGTACCAAGGTGGAAATCAAGCGTTGTGAGGCC |
| | | ACTCACAAGACATCAACTTCACCCATTGTCAAGAGCT |
| | | TCAACAGGAATGAGTGT |
| 871 | Spacer + | QGQSGSIACRHFMEQLPFCHHGGGSSGGSGGSGGTSTSG |
| | PL04-0003 | RSANPRGGGSDIQMTQSPSSLSASVGDRVTITCRASQSIS |
| | LC (amino | SYLNWYQQKPGKAPKLLIYAASSLQSGVPSRFSGSGSGT |
| | acid | DFTLTISSLQPEDFATYYCQQDNGYPSTFGGGTKVEIKR |
| | sequence) | |
| 872 | PL04-0003 | ATTGCGTGCCGGCATTTTATGGAGCAGTTGCCGTTTTG |
| | LC | CCATCATGGAGGTGGCTCGAGCGGTGGCAGCGGTGGC |
| | nucleotide | TCTGGTGGTACTAGCACCTCTGGTCGTTCCGCTAACCC |
| | sequence | ACGTGGCGGCGGTTCTGACATCCAGATGACCCAGAGC |
| | | CCCAGCAGCCTGTCTGCTAGCGTGGGCGACAGAGTGA |
| | | CCATCACCTGTAGAGCCAGCCAGAGCATCAGCAGCTA |
| | | CCTGAACTGGTATCAGCAGAAGCCCGGCAAGGCCCCC |
| | | AAACTGCTGATCTACGCCGCCAGCTCTCTGCAGTCTG |
| | | GCGTGCCCAGCAGATTTTCCGGCAGCGGCTCTGGCAC |
| | | CGACTTCACCCTGACCATCAGCTCCCTGCAGCCCGAG |
| | | GACTTCGCCACCTACTACTGCCAGCAGGACAACGGCT |
| | | ACCCCAGCACCTTTGGCGGAGGTACCAAGGTGGAAAT |
| | | CAAGCGTTGTGAGGCCACTCACAAGACATCAACTTCA |
| | | CCCATTGTCAAGAGCTTCAACAGGAATGAGTGT |
| 873 | PL04-0003 | IACRHFMEQLPFCHHGGGSSGGSGGSGGTSTSGRSANPR |
| | LC amino | GGGSDIQMTQSPSSLSASVGDRVTITCRASQSISSYLNWY |
| | acid | QQKPGKAPKLLIYAASSLQSGVPSRFSGSGSGTDFTLTIS |
| | sequence | SLQPEDFATYYCQQDNGYPSTFGGGTKVEIKR |
| 874 | Spacer + | CAAGGTCAGTCTGGATCCTTTGGTCCTAGGTGCGGTG |
| | PL05-0003 | AGGCTTCTACTGCGTTCCGTATGAGGGAGGTGGCTC |
| | LC | GAGCGGTGGCAGCGGTGGCTCTGGTGGTACTAGCACC |
| | (nucleotide | TCTGGTCGTTCCGCTAACCCACGTGGCGGCGGTTCTG |
| | sequence) | ACATCCAGATGACCCAGAGCCCCAGCAGCCTGTCTGC |
| | | TAGCGTGGGCGACAGAGTGACCATCACCTGTAGAGCC |
| | | AGCCAGAGCATCAGCAGCTACCTGAACTGGTATCAGC |
| | | AGAAGCCCGGCAAGGCCCCCAAACTGCTGATCTACGC |
| | | CGCCAGCTCTCTGCAGTCTGGCGTGCCCAGCAGATTT |
| | | TCCGGCAGCGGCTCTGGCACCGACTTCACCCTGACCA |
| | | TCAGCTCCCTGCAGCCCGAGGACTTCGCCACCTACTA |
| | | CTGCCAGCAGGACAACGGCTACCCCAGCACCTTTGGC |
| | | GGAGGTACCAAGGTGGAAATCAAGCGTTGTGAGGCC |
| | | ACTCACAAGACATCAACTTCACCCATTGTCAAGAGCT |
| | | TCAACAGGAATGAGTGT |
| 875 | Spacer + | QGQSGSFGPRCGEASTCVPYEGGGSSGGSGGSGGTSTSG |
| | PL05-0003 | RSANPRGGGSDIQMTQSPSSLSASVGDRVTITCRASQSIS |
| | LC (amino | SYLNWYQQKPGKAPKLLIYAASSLQSGVPSRFSGSGSGT |
| | acid | DFTLTISSLQPEDFATYYCQQDNGYPSTFGGGTKVEIKR |
| | sequence) | |
| 876 | PL05-0003 | TTTGGTCCTAGGTGCGGTGAGGCTTCTACTTGCGTTCC |
| | LC | GTATGAGGGAGGTGGCTCGAGCGGTGGCAGCGGTGG |
| | nucleotide | CTCTGGTGGTACTAGCACCTCTGGTCGTTCCGCTAACC |
| | sequence | CACGTGGCGGCGGTTCTGACATCCAGATGACCCAGAG |
| | | CCCCAGCAGCCTGTCTGCTAGCGTGGGCGACAGAGTG |
| | | ACCATCACCTGTAGAGCCAGCCAGAGCATCAGCAGCT |
| | | ACCTGAACTGGTATCAGCAGAAGCCCGGCAAGGCCCC |
| | | CAAACTGCTGATCTACGCCGCCAGCTCTCTGCAGTCT |
| | | GGCGTGCCCAGCAGATTTTCCGGCAGCGGCTCTGGCA |
| | | CCGACTTCACCCTGACCATCAGCTCCCTGCAGCCCGA |
| | | GGACTTCGCCACCTACTACTGCCAGCAGGACAACGGC |
| | | TACCCCAGCACCTTTGGCGGAGGTACCAAGGTGGAAA |
| | | TCAAGCGTTGTGAGGCCACTCACAAGACATCAACTTC |
| | | ACCCATTGTCAAGAGCTTCAACAGGAATGAGTGT |
| 877 | PL05-0003 | FGPRCGEASTCVPYEGGGSSGGSGGSGGTSTSGRSANPR |
| | LC amino | GGGSDIQMTQSPSSLSASVGDRVTITCRASQSISSYLNWY |
| | acid | QQKPGKAPKLLIYAASSLQSGVPSRFSGSGSGTDFTLTIS |
| | sequence | SLQPEDFATYYCQQDNGYPSTFGGGTKVEIKR |
| 878 | Spacer + | CAAGGTCAGTCTGGATCCATTCTTTATTGCGATAGTTG |
| | PL06-0003 | GGGGGCGGGGTGCTTGACGCGGCCGGGAGGTGGCTC |
| | LC | GAGCGGTGGCAGCGGTGGCTCTGGTGGTACTAGCACC |
| | (nucleotide | TCTGGTCGTTCCGCTAACCCACGTGGCGGCGGTTCTG |
| | sequence) | ACATCCAGATGACCCAGAGCCCCAGCAGCCTGTCTGC |
| | | TAGCGTGGGCGACAGAGTGACCATCACCTGTAGAGCC |
| | | AGCCAGAGCATCAGCAGCTACCTGAACTGGTATCAGC |
| | | AGAAGCCCGGCAAGGCCCCCAAACTGCTGATCTACGC |
| | | CGCCAGCTCTCTGCAGTCTGGCGTGCCCAGCAGATTT |
| | | TCCGGCAGCGGCTCTGGCACCGACTTCACCCTGACCA |
| | | TCAGCTCCCTGCAGCCCGAGGACTTCGCCACCTACTA |
| | | CTGCCAGCAGGACAACGGCTACCCCAGCACCTTTGGC |
| | | GGAGGTACCAAGGTGGAAATCAAGCGTTGTGAGGCC |
| | | ACTCACAAGACATCAACTTCACCCATTGTCAAGAGCT |
| | | TCAACAGGAATGAGTGT |
| 879 | Spacer + | QGQSGSILYCDSWGAGCLTRPGGGSSGGSGGSGGTSTS |
| | PL06-0003 | GRSANPRGGGSDIQMTQSPSSLSASVGDRVTITCRASQSI |
| | LC (amino | SSYLNWYQQKPGKAPKLLIYAASSLQSGVPSRFSGSGSG |
| | acid | TDFTLTISSLQPEDFATYYCQQDNGYPSTFGGGTKVEIKR |
| | sequence) | |
| 880 | PL06-0003 | ATTCTTTATTGCGATAGTTGGGGGGCGGGGTGCTTGA |
| | LC | CGCGGCCGGGAGGTGGCTCGAGCGGTGGCAGCGGTG |
| | nucleotide | GCTCTGGTCTGTACTAGCACCTCTGGTCGTTCCGCTAAC |
| | sequence | CCACGTGGCGGCGGTTCTGACATCCAGATGACCCAGA |
| | | GCCCCAGCAGCCTGTCTGCTAGCGTGGGCGACAGAGT |
| | | GACCATCACCTGTAGAGCCAGCCAGAGCATCAGCAGC |
| | | TACCTGAACTGGTATCAGCAGAAGCCCGGCAAGGCCC |
| | | CCAAACTGCTGATCTACGCCGCCAGCTCTCTGCAGTC |
| | | TGGCGTGCCCAGCAGATTTTCCGGCAGCGGCTCTGGC |
| | | ACCGACTTCACCCTGACCATCAGCTCCCTGCAGCCCG |
| | | AGGACTTCGCCACCTACTACTGCCAGCAGGACAACGG |
| | | CTACCCCAGCACCTTTGGCGGAGGTACCAAGGTGGAA |
| | | ATCAAGCGTTGTGAGGCCACTCACAAGACATCAACTT |
| | | CACCCATTGTCAAGAGCTTCAACAGGAATGAGTGT |
| 881 | PL06-0003 | ILYCDSWGAGCLTRPGGGSSGGSGGSGGTSTSGRSANPR |
| | LC amino | GGGSDIQMTQSPSSLSASVGDRVTITCRASQSISSYLNWY |
| | acid | QQKPGKAPKLLIYAASSLQSGVPSRFSGSGSGTDFTLTIS |
| | sequence | SLQPEDFATYYCQQDNGYPSTFGGGTKVEIKR |
| 882 | Spacer + | CAAGGTCAGTCTGGATCCGGGATTGCGTTGTGCCCGT |
| | PL07-0003 | CTCATTTTTGCCAGCTGCCTCAGACTGGAGGTGGCTC |
| | LC | GAGCGGTGGCAGCGGTGGCTCTGGTGGTACTAGCACC |
| | (nucleotide | TCTGGTCGTTCCGCTAACCCACGTGGCGGCGGTTCTG |
| | seqnouce) | ACATCCAGATGACCCAGAGCCCCAGCAGCCTGTCTGC |
| | | TAGCGTGGGCGACAGAGTGACCATCACCTGTAGAGCC |
| | | AGCCAGAGCATCAGCAGCTACCTGAACTGGTATCAGC |
| | | AGAAGCCCGGCAAGGCCCCCAAACTGCTGATCTACGC |
| | | CGCCAGCTCTCTGCAGTCTGGCGTGCCCAGCAGATTT |
| | | TCCGGCAGCGGCTCTGGCACCGACTTCACCCTGACCA |
| | | TCAGCTCCCTGCAGCCCGAGGACTTCGCCACCTACTA |
| | | CTGCCAGCAGGACAACGGCTACCCCAGCACCTTTGGC |
| | | GGAGGTACCAAGGTGGAAATCAAGCGTTGTGAGGCC |
| | | ACTCACAAGACATCAACTTCACCCATTGTCAAGAGCT |
| | | TCAACAGGAATGAGTGT |
| 883 | Spacer + | QGQSGSGIALCPSHFCQLPQTGGGSSGGSGGSGGTSTSG |
| | PL07-0003 | RSANPRGGGSDIQMTQSPSSLSASVGDRVTITCRASQSIS |
| | LC (amino | SYLNWYQQKPGKAPKLLIYAASSLQSGVPSRFSGSGSGT |
| | acid | DFTLTISSLQPEDFATYYCQQDNGYPSTFGGGTKVEIKR |
| | sequence) | |
| 884 | PL07-0003 | GGGATTGCGTTGTGCCCGTCTCATTTTTGCCAGCTGCC |
| | LC | TCAGACTGGAGGTGGCTCGAGCGGTGGCAGCGGTGG |
| | nucleotide | CTCTGGTGGTACTAGCACCTCTGGTCGTTCCGCTAACC |
| | sequence | CACGTGGCGGCGGTTCTGACATCCAGATGACCCAGAG |
| | | CCCCAGCAGCCTGTCTGCTAGCGTGGGCGACAGAGTG |
| | | ACCATCACCTGTAGAGCCAGCCAGAGCATCAGCAGCT |
| | | ACCTGAACTGGTATCAGCAGAAGCCCGGCAAGGCCCC |
| | | CAAACTGCTGATCTACGCCGCCAGCTCTCTGCAGTCT |
| | | GGCGTGCCCAGCAGATTTTCCGGCAGCGGCTCTGGCA |
| | | CCGACTTCACCCTGACCATCAGCTCCCTGCAGCCCGA |
| | | GGACTTCGCCACCTACTACTGCCAGCAGGACAACGGC |
| | | TACCCCAGCACCTTTGGCGGAGGTACCAAGGTGGAAA |
| | | TCAAGCGTTGTGAGGCCACTCACAAGACATCAACTTC |
| | | ACCCATTGTCAAGAGCTTCAACAGGAATGAGTGT |
| 885 | PL07-0003 | GIALCPSHFCQLPQTGGGSSGGSGGSGGTSTSGRSANPR |
| | LC amino | GGGSDIQMTQSPSSLSASVGDRVTITCRASQSISSYLNWY |
| | acid | QQKPGKAPKLLIYAASSLQSGVPSRFSGSGSGTDFTLTIS |
| | sequence | SLQPEDFATYYCQQDNGYPSTFGGGTKVEIKR |
| 886 | Spacer + | CAAGGTCAGTCTGGATCCGATGGGCCGCGTTGCTTTG |
| | PL08-0003 | TGTCGGGGGAGTGCTCTCCGATTGGTGGAGGTGGCTC |
| | LC | GAGCGGTGGCAGCGGTGGCTCTGGTGGTACTAGCACC |
| | (nucleotide | TCTGGTCGTTCCGCTAACCCACGTGGCGGCGGTTCTG |
| | sequence) | ACATCCAGATGACCCAGAGCCCCAGCAGCCTGTCTGC |
| | | TAGCGTGGGCGACAGAGTGACCATCACCTGTAGAGCC |
| | | AGCCAGAGCATCAGCAGCTACCTGAACTGGTATCAGC |
| | | AGAAGCCCGGCAAGGCCCCCAAACTGCTGATCTACGC |
| | | CGCCAGCTCTCTGCAGTCTGGCGTGCCCAGCAGATTT |
| | | TCCGGCAGCGGCTCTGGCACCGACTTCACCCTGACCA |
| | | TCAGCTCCCTGCAGCCCGAGGACTTCGCCACCTACTA |
| | | CTGCCAGCAGGACAACGGCTACCCCAGCACCTTTGGC |
| | | GGAGGTACCAAGGTGGAAATCAAGCGTTGTGAGGCC |
| | | ACTCACAAGACATCAACTTCACCCATTGTCAAGAGCT |
| | | TCAACAGGAATGAGTGT |
| 887 | Spacer + | QGQSGSDGPRCFVSGECSPIGGGGSSGGSGGSGGTSTSG |
| | PL08-0003 | RSANPRGGGSDIQMTQSPSSLSASVGDRVTITCRASQSIS |
| | LC (amino | SYLNWYQQKPGKAPKLLIYAASSLQSGVPSRFSGSGSGT |
| | acid | DFTLTISSLQPEDFATYYCQQDNGYPSTFGGGTKVEIKR |
| | sequence) | |
| 888 | PL08-0003 | GATGGGCCGCGTTGCTTTGTGTCGGGGGAGTGCTCTC |
| | LC | CGATTGGTGGAGGTGGCTCGAGCGGTGGCAGCGGTG |
| | nucleotide | GCTCTGGTGGTACTAGCACCTCTGGTCGTTCCGCTAAC |
| | sequence | CCACGTGGCGGCGGTTCTGACATCCAGATGACCCAGA |
| | | GCCCCAGCAGCCTGTCTGCTAGCGTGGGCGACAGAGT |
| | | GACCATCACCTGTAGAGCCAGCCAGAGCATCAGCAGC |
| | | TACCTGAACTGGTATCAGCAGAAGCCCGGCAAGGCCC |
| | | CCAAACTGCTGATCTACGCCGCCAGCTCTCTGCAGTC |
| | | TGGCGTGCCCAGCAGATTTTCCGGCAGCGGCTCTGGC |
| | | ACCGACTTCACCCTGACCATCAGCTCCCTGCAGCCCG |
| | | AGGACTTCGCCACCTACTACTGCCAGCAGGACAACGG |
| | | CTACCCCAGCACCTTTGGCGGAGGTACCAAGGTGGAA |
| | | ATCAAGCGTTGTGAGGCCACTCACAAGACATCAACTT |
| | | CACCCATTGTCAAGAGCTTCAACAGGAATGAGTGT |
| 889 | PL08-0003 | DGPRCFVSGECSPIGGGGSSGGSGGSGGTSTSGRSANPR |
| | LC amino | GGGSDIQMTQSPSSLSASVGDRVTITCRASQSISSYLNWY |
| | acid | QQKPGKAPKLLIYAASSLQSGVPSRFSGSGSGTDFTLTIS |
| | sequence | SLQPEDFATYYCQQDNGYPSTFGGGTKVEIKR |
| 890 | Spacer + | CAAGGTCAGTCTGGATCCTTGTGCTATAAGCTGGATT |
| | PL09-0003 | ATGATGATAGGTCTTATTGCCATATTGGAGGTGGCTC |
| | LC | GAGCGGTGGCACTCGGTGGCTCTGGTGGTACTAGCACC |
| | (nucleotide | TCTGGTCGTTCCGCTAACCCACGTGGCGGCGGTTCTG |
| | sequence) | ACATCCAGATGACCCAGAGCCCCAGCAGCCTGTCTGC |
| | | TAGCGTGGGCGACAGAGTGACCATCACCTGTAGAGCC |
| | | AGCCAGAGCATCAGCAGCTACCTGAACTGGTATCAGC |
| | | AGAAGCCCGGCAAGGCCCCCAAACTGCTGATCTACGC |
| | | CGCCAGCTCTCTGCAGTCTGGCCTGCCCAGCAGATTT |
| | | TCCGGCAGCGGCTCTGGCACCGACTTCACCCTGACCA |
| | | TCAGCTCCCTGCAGCCCGAGGACTTCGCCACCTACTA |
| | | CTGCCAGCAGGACAACGGCTACCCCAGCACCTTTGGC |
| | | GGAGGTACCAAGGTGGAAATCAAGCGTTGTGAGGCC |
| | | ACTCACAAGACATCAACTTCACCCATTGTCAAGAGCT |
| | | TCAACAGGAATGAGTGT |
| 891 | Spacer + | QGQSGSLCYKLDYDDRSYCHIGGGSSGGSGGSGGTSTS |
| | PL09-0003 | GRSANPRGGGSDIQMTQSRSSLSASVGDRVTITCRASQSI |
| | LC (amino | SSYLNWYQQKPGKAPKLLIYAASSLQSGVPSRFSGSGSG |
| | acid | TDFLLTISSLQPEDFATYYCQQDNGYPSTFGGGTKVEIKR |
| | sequence | |
| 892 | PL09-0003 | TTGTGCTATAAGCTGGATTATGATGATAGGTCTTATTG |
| | LC | CCATATTGGAGGTGGCTCGAGCGGTGGCAGCGGTGGC |
| | nucleotide | TCTGGTGGTACIAGCACCTCTGGTCGTTCCGCTAACCC |
| | sequence | ACGTGGCGGCGGTTCTGACATCCAGATGACCCAGAGC |
| | | CCCAGCAGCCTGTCTGCTAGCGTGGGCGACAGAGTGA |
| | | CCATCACCTGTAGAGCCAGCCAGAGCATCAGCAGCTA |
| | | CCTGAACTGGTATCAGCAGAAGCCCGGCAAGGCCCCC |
| | | AAACTGCTGATCTACGCCGCCAGCTCTCTGCAGTCTG |
| | | GCGTGCCCAGCAGATTTTCCGGCAGCGGCTCTGGCAC |
| | | CGACTTCACCCTGACCATCAGCTCCCTGCAGCCCGAG |
| | | GACTTCGCCACCTACTACTGCCAGCAGGACAACGGCT |
| | | ACCCCAGCACCTTTGGCGGAGGTACCAAGGTGGAAAT |
| | | CAAGCGTTGTGAGGCCACTCACAAGACATCAACTTCA |
| | | CCCATTGTCAAGAGCTTCAACAGGAATGAGTGT |
| 893 | PL09-0003 | LCYKLDYDDRSYCHIGGGSSGGSGGSGGTSTSGRSANPR |
| | LC amino | GGGSDIQMTQSPSSLSASVGDRVTITCRASQSISSYLNWY |
| | acid | QQKPGKAPKLLIYAASSLQSHVPSRFSGSGSGTDFFLTIS |
| | sequence | SLQPEDFATYYCQDNGYPSTFGGGTKVEIKR |
| 894 | Spacer + | CAAGGTCAGTCTGGATCCCCGTGCCATCCGCATCCTT |
| | PL10-0003 | ATGATGCTCGTCCTTATTGCAATGTGGGAGGTGGCTC |
| | LC | GAGCGGTGGCAGCGGTGGCTCTGGTGGTACTAGCACC |
| | (nucleotide | TCTGGTCGTTCCGCTAACCCACGTGGCGGCGGTTCTG |
| | sequence) | ACATCCAGATGACCCAGAGCCCCAGCAGCCTGTCTGC |
| | | TAGCGTGGGCGACAGAGTGACCATCACCTGTAGAGCC |
| | | AGCCAGAGCATCAGCAGCTACCTGAACTGGTATCAGC |
| | | AGAAGCCCGGCAACTGCCCCCAAACTGCTGATCTACGC |
| | | CGCCAGCTCTCTGCAGTCTGGCGTGCCCAGCAGATTT |
| | | TCCGGCAGCGGCTCTGGCACCGACTTCACCCTGACCA |
| | | TCAGCTCCCTGCAGCCCGAGGACTTCGCCACCTACTA |
| | | CTGCCAGCAGGACAACGGCTACCCCAGCACCTTTGGC |
| | | GGAGGTACCAAGGTGGAAATCAAGCGTTGTGAGGCC |
| | | ACTCACAAGACATCAACTTCACCCATTGTCAAGAGCT |
| | | TCAACAGGAATGAGTGT |
| 895 | Spacer + | QGQSGSPCHPHPYDARPYCNVGGGSSGGSGGSGGTSTS |
| | PL10-0003 | GRSANPRGGGSDIQMTQSPSSLSASVGDRVTITCRASQSI |
| | LC (amino | SSYLNWYQQKPGKAPKLLIYAASTLQSGVPSRFSGSGSG |
| | acid | TDFTLTISSLQPEDFATYYCQQDNGYPSTFGGGTKVEIKR |
| | sequence) | |
| 896 | PL10-0003 | CCGTGCCATCCGCATCCTTATGATGCTCGTCCTTATTG |
| | LC | CAATGTGGGAGGTGGCTCGAGCGGTGGCAGCGGTGG |
| | nucleotide | CTCTGGTGGTACTAGCACCTCTGGTCGTTCCGCTAACC |
| | sequence | CACGTGGCGGCGGTTCTGACATCCAGATGACCCAGAG |
| | | CCCCAGCACTCCTGTCTGCTAGCGTGGGCGACAGAGTG |
| | | ACCATCACCTGTAGAGCCAGCCAGAGCATCAGCAGCT |
| | | ACCTGAACTGGTATCAGCAGAAGCCCGGCAAGGCCCC |
| | | CAAACTGCTGATCTACGCCGCCAGCTCTCTGCAGTCT |
| | | GGCGTGCCCAGCAGATTTTCCGGCAGCGGCTCTGGCA |
| | | CCGACTTCACCCTGACCATCAGCTCCCTGCAGCCCGA |
| | | GGACTTCGCCACCTACTACTGCCAGCAGGACAACGGC |
| | | TACCCCAGCACCTTTGGCGGAGGTACCAAGGTGGAAA |
| | | TCAAGCGTTGTGAGGCCACTCACAAGACATCAACTTC |
| | | ACCCATTGTCAAGAGCTTCAACAGGAATGAGTGT |
| 897 | PL10-0003 | PCHPHPYDARPYCNVGGGSSGGSGGSGGTSTSGRSANP |
| | LC amino | RGGGSDIQMTQSPSSLSASVGDRVTITCRASQSISSYLNW |
| | acid | YQQKPGKAPKLLIYAASSLQSGVPSRFSGSGSGTDFTLTI |
| | sequence | SLQPEDFATYYCQQDNGYPSTFGGGTKVEIKR |
| 898 | Spacer + | CAAGGTCAGTCTGGATCCCCTTGCTATTGGCATCCTTT |
| | PL11-0003 | TTTTGCGTATAGGTATTGCAATACTGGAGGTGGCTCG |
| | LC | AGCGGTGGCAGCGGTGGCTCTGGTGGTACTAGCACCT |
| | (nucleotide | CTGGTCGTTCCGCTAACCCACGTGGCGGCGGTTCTGA |
| | sequence) | CATCCAGATGACCCAGAGCCCCAGCAGCCTGTCTGCT |
| | | AGCGTGGGCGACAGAGTGACCATCACCTGTAGAGCC |
| | | AGCCAGAGCATCAGCAGCTACCTGAACTGGTATCAGC |
| | | AGAAGCCCGGCAAGGCCCCCAAACTGCTGATCTACGC |
| | | CGCCAGCTCTCTGCAGTCTGGCGTGCCCAGCAGATTT |
| | | TCCGGCAGCGGCTCTGGCACCGACTTCACCCTGACCA |
| | | TCAGCTCCCTGCAGCCCGAGGACTTCGCCACCTACTA |
| | | CTGCCAGCAGGACAACGGCTACCCCAGCACCTTTGGC |
| | | GGAGGTACCAAGGTGGAAATCAAGCGTTGTGAGGCC |
| | | ACTCACAAGACATCAACTTCACCCATTGTCAAGAGCT |
| | | TCAACAGGAATGAGTGT |
| 899 | Spacer + | QGQSGSPCYWHPFFAYRYCNTGGGSSGGSGGSGGTSTS |
| | PL10-003 | GRSANPRGGGSDIQMTQSPSSLSASVGDRVTITCRASQSI |
| | LC (amino | SSYLNWYQQKPGKAPKLLIYAASSLQSGVPSRFSGSGSG |
| | acid | TDFTLTISSLQPEDFATYYCQQDNGYPSTFGGGTKVEIKR |
| | sequence) | |
| 900 | PL11-0003 | CCTTGCTATTGGCATCCTTTTTTTGCGTATAGGTATG |
| | LC | CAATACTGGAGGTGGCTCGAGCGGTGGCAGCGGTGG |
| | nucleotide | CTCTGGTGGTACTAGCACCTCTGGTCGTTCCGCTAACC |
| | sequence | CACGTGGCGGCGGTTCTGACATCCAGATGACCCAGAG |
| | | CCCCAGCAGCCTGTCTGCTAGCGTGGGCGACAGAGTG |
| | | ACCATCACCTGTAGAGCCAGCCAGAGCATCAGCAGCT |
| | | ACCTGAACTGGTATCAGCAGAAGCCCGGCAAGGCCCC |
| | | CAAACTGCTGATCTACGCCGCCAGCTCTCTGCAGTCT |
| | | GGCGTGCCCAGCAGATTTTCCGGCAGCGGCTCTGGCA |
| | | CCGACTTCACCCTGACCATCAGCTCCCTGCAGCCCGA |
| | | GGACTTCGCCACCTACTACTGCCAGCAGGACAACGGC |
| | | TACCCCAGCACCTTTGGCGGAGGTACCAAGGTGGAAA |
| | | TCAAGCGTTGTGAGGCCACTCACAAGACATCAACTTC |
| | | ACCCATTGTCAAGAGCTTCAACAGGAATGAGTGT |
| 901 | PL11-0003 | PCYWHPFFAYRYCNTGGGSSGGSGGSGGTSTSGRSANP |
| | LC amino | RGGGSDIQMTQSPSSLSASVGDRVTITCRASQSISSYLNW |
| | acid | YQQKPGKAPKLLIYAASSLQSGVPSRFSGSGSGTDFTLTI |
| | sequence | SSLQPEDFATYYCQQDNGYPSTFGGGTKVEIKR |
| 902 | Spacer + | CAAGGTCAGTCTGGATCCGTTTGCTATTATATGGATTG |
| | PL12-0003 | GTTGGGGCGGAATTGGTGCTCFTCGGGAGGTGGCTCG |
| | LC | AGCGGTGGCAGCGGTGGCTCTGGTGGTACTAGCACCT |
| | (nucleotide | CTGGTCGTTCCGCTAACCCACGTGGCGGCGGTTCTGA |
| | sequence) | CATCCAGATGACCCAGAGCCCCAGCAGCCTGTCTGCT |
| | | AGCGTGGGCGACAGAGTGACCATCACCTGTAGAGCC |
| | | AGCCAGAGCATCAGCAGCTACCTGAACTGGTATCAGC |
| | | AGAAGCCCGGCAAGGCCCCCAAACTGCTGATCTACGC |
| | | CGCCAGCTCTCTGCAGTCTGGCGTGCCCAGCAGATTT |
| | | TCCGGCAGCGGCTCTGGCACCGACTTCACCCTGACCA |
| | | TCAGCTCCCTGCAGCCCGAGGACTTCGCCACCTACTA |
| | | CTGCCAGCAGGACAACGGCTACCCCAGCACCTTTGGC |
| | | GGAGGTACCAAGGTGGAAATCAAGCGTTGTGAGGCC |
| | | ACTCACAAGACATCAACTTCACCCATTGTCAAGAGCT |
| | | TCAACAGGAATGAGTGT |
| 903 | Spacer + | QGQSGSVCYYMDWLGRNWCSSGGGSSGGSGGSGGTST |
| | PL12-0003 | SGRSANPRGGGSDIQMTQSPSSLSASVGDRVTITCRASQS |
| | LC (amino | ISSYLNWYQQKPGKAPKLLIYAASSLQSGVPSRFSGSGS |
| | acid | GTDFTLTISSLQPEDFATYYCQQDNGYPSTFGGGTKVEI |
| | sequence) | KR |
| 904 | PL12-0003 | GTTTGCTATTATATGGATTGGTTGGGGCGGAATTGGT |
| | LC | GCTCTTCGGGAGGTGGCTCGAGCGGTGGCAGCGGTGG |
| | nucleotide | CTCTGGTGGTACTAGCACCTCTGGTCGTTCCGCTAACC |
| | sequence | CACGTGGCGGCGGTTCTGACATCCAGATGACCCAGAG |
| | | CCCCAGCAGCCTGTCTGCTAGCGTGGGCGACAGAGTG |
| | | ACCATCACCTGTAGAGCCAGCCAGAGCATCAGCAGCT |
| | | ACCTGAACTGGTATCAGCAGAAGCCCGGCAAGGCCCC |
| | | CAAACTGCTGATCTACGCCGCCAGCTCTCTGCAGTCT |
| | | GGCGTGCCCAGCAGATTTTCCGGCAGCGGCTCTGGCA |
| | | CCGACTTCACCCTGACCATAGCTCCCTGCAGCCCGA |
| | | GGACTTCGCCACCTACTACTGCCAGCAGGACAACGGC |
| | | TACCCCAGCACCTTTGGCGGAGGTACCAAGGTGGAAA |
| | | TCAAGCGTTGTGAGGCCACTCACAAGACATCAACTTC |
| | | ACCCATTGTCAAGAGCTTCAACAGGAATGAGTGT |
| 905 | PL12-0003 | VCYYMDWLGRNWCSSGGGSSGGSGGSGGTSTSGRSAN |
| | LC amino | PRGGGSDIQMTQSPSSLSASVGDRVTITCRASQSISSYLN |
| | acid | WYQQKPGKAPKLLIYAASSLQSGVPSRFSGSGSGTDFTL |
| | sequence | TISSLQPEDFATYYCQQDNGYPSTFGGGTKVEIKR |
| 906 | Spacer + | CAAGGTCAGTCTGGATCCCTGTGCGATCTGTTTAAGTT |
| | PL13-0003 | GCGTGAGTTTCCTTATTGCATGGGGGGAGGTGGCTCG |
| | LC | AGCGGTGGCAGCGGTGGCTCTGGTGGTACTAGCACCT |
| | (nucleotide | CTGGTCGTTCCGCTAACCCACGTGGCGGCGGTTCTGA |
| | sequence) | CATCCAGATGACCCAGAGCCCCAGCAGCCTGTCTGCT |
| | | AGCGTGGGCGACAGAGTGACCATCACCTGTAGAGCC |
| | | AGCCAGAGCATCAGCAGCTACCTGAACTGGTATCAGC |
| | | AGAAGCCCGGCAAGGCCCCCAAACTGCTGATCTACGC |
| | | CGCCAGCTCTCTGCAGTCTGGCGTGCCCAGCAGATTT |
| | | TCCGGCAGCGGCTCTGGCACCGACTTCACCCTGACCA |
| | | TCAGCTCCCTGCAGCCCGAGGACTTCGCCACCTACTA |
| | | CTGCCAGCAGGACAACGGCTACCCCAGCACCTTTGGC |
| | | GGAGGTACCAAGGTGGAAATCAAGCGTTGTGAGGCC |
| | | ACTCACAAGACATCAACTTCACCCATTGTCAAGAGCT |
| | | TCAACAGGAATGAGTGT |
| 907 | Spacer + | QGQSGSLCDLFKLREFRYCMGGGGSSGGSGGSGGTSTS |
| | PL13-0003 | GRSANPRGGGSDIQMTQSPSSLSASVGDRVTITCRASQSI |
| | LC (amino | SSYLNWYQQKPGKAPKLLIYAASSLQSGVPSRFSGSGSG |
| | acid | TDFTLTISSLQPEDFATYYCQQDNGYPSTFGGGTKVEIKR |
| | sequence) | |
| 908 | PL13-0003 | CTGTGCGATCTGTTTAAGTTGCGTGAGTTTCCTTATTG |
| | LC | CATGGGGGGAGGTGGCTCGAGCGGTGGCAGCGGTGG |
| | nucleotide | CTCTGGTGGTACTAGCACCTCTGGTCGTTCCGCTAACC |
| | sequence | CACGTGGCGGCGGTTCTGACATCCAGATGACCCAGAG |
| | | CCCCAGCAGCCTTGTCTGCTAGCGTGGGCGACAGAGTG |
| | | ACCATCACCTGTAGAGCCAGCCAGAGCATCAGCAGCT |
| | | ACCTGAACTGGTATCAGCAGAAGCCCGGCAAGGCCCC |
| | | CAAACTGCTGATCTACGCCGCCAGCTCTCTGCAGTCT |
| | | GGCGTGCCCAGCAGATTTTCCGGCAGCGGCTCTGGCA |
| | | CCGACTTCACCCTGACCATCAGCTCCCTGCAGCCCGA |
| | | GGACTTCGCCACCTACTACTGCCAGCAGGACAACGGC |
| | | TACCCCAGCACCTTTGGCGGAGGTACCAAGGTGGAAA |
| | | TCAAGCGTTGTGAGGCCACTCACAAGACATCAACTTC |
| | | ACCCATTGTCAAGAGCTTCAACAGGAATGAGTGT |
| 909 | PL13-0003 | LCDLFKLREFPYCMGGGGSSGGSGGSGGTSTSGRSANPR |
| | LC amino | GGGSDIQMTQSPSSLSASVGDRVTITCRASQSISSYLNWY |
| | acid | QQKPGKAPKLLIYAASSLQSGVPSRFSGSGSGTDFTLTIS |
| | sequence | SLQPEDFATYYCQQDNGYPSTFGGGTKVEIKR |
| 910 | Spacer + | CAAGGTCAGTCTGGATCCTATCTTCCGTGCCATTTTGT |
| | PL14-0003 | TCCGATTGGGGCTTGCAATAATAAGGGAGGTGGCTCG |
| | LC | AGCGGTGGCAGCGGTGGCTCTGGTGGTACTAGCACCT |
| | (nucleotide | CTGGTCGTCCGCTAACCCACGTGGCGGCGGTTCTGA |
| | sequence) | CATCCAGATGACCCAGAGCCCCAGCAGCCTGTCTGCT |
| | | AGCGTGGGCGACAGAGTGACCATCACCTGTACGACGC |
| | | AGCCAGAGCATCAGCAGCTACCTGAACTGGTATCAGC |
| | | AGAAGCCCGGCAAGGCCCCCAAACTGCTGATCTACGC |
| | | CGCCAGCTCTCTGCACTTCTGGCGTGCCCAGCAGATTT |
| | | TCCGGCAGCGGCTCTGGCACCGACTTCACCCTGACCA |
| | | TCAGCTCCCTGCAGCCCGAGGACTTCGCCACCTACTA |
| | | CTGCCAGCAGGACAACGGCTACCCCAGCACCTTTGGC |
| | | GGAGGTACCAAGCTTGGAAATCAAGCGTTGTGAGGCC |
| | | ACTCACAAGACATCAACTTCACCCATTGTCAAGAGCT |
| | | TCAACAGGAATGAGTGT |
| 911 | Spacer + | QGQSGSYLPCHFVPIGACNNKGGGSSGGSGGSGGTSTSG |
| | PL14-0003 | RSANPRGGGSDIQMTQSPSSLSASVGDRVTITCRASQSIS |
| | LC (amino | SYLNWYQQKPGKAPKLLIYAASSLQSGVPSRFSGSGSGT |
| | acid | DFTLTISSLQPEDFATYYCQQDNGYPSTFGGGTKVEIKR |
| | sequence) | |
| 912 | P114-0003 | TATCTTCCGTGCCATTTTGTTCCGATTGGGGCTTGCAA |
| | LC | TAATAAGGGAGGTGGCTCGAGCGGTGGCAGCGGTGG |
| | nucleotide | CTCTGGTGGTACTAGCACCTCTGGTCGTTCCGCTAACC |
| | sequence | CACGTGGCGGCGGTTCTGACATCCAGATGACCCAGAG |
| | | CCCCAGCAGCCTGTCTGCTAGCGTGGGCGACAGAGTG |
| | | ACCATCACCTGTAGAGCCAGCCAGAGCATCAGCAGCT |
| | | ACCTGAACTGGTATCAGCAGAAGCCCGGCAAGGCCCC |
| | | CAAACTGCTGATCTACGCCGCCAGCTCTCTGCAGTCT |
| | | GCCGTGCCCAGCAGATTTTCCGGCAGCGGCTCTGGCA |
| | | CCGACTTCACCCTGACCATCAGCTCCCTGCAGCCCGA |
| | | GGACTTCGCCACCTACTACTGCCAGCAGGACAACGGC |
| | | TACCCCAGCACCTTTGGCGGAGGTACCAAGGTGGAAA |
| | | TCAAGCGTTGTGAGGCCACTCACAAGACATCAACTTC |
| | | ACCCATTGTCAAGAGCTTCAACAGGAATGAGTGT |
| 913 | PL14-0003 | YLPCHFVPIGACNNKGGGSSGGSGGSGGTSTSGRSANPR |
| | LC amino | GGGSDIQMTQSPSSLSASVGDRVTITCRASQSISSYLNWY |
| | acid | QQKPGKAPKLLIYAASSLQSGVPSRFSGSGSGTDFTLTIS |
| | sequence | SLQPEDFATYYCQQDNGYPSTFGGGTKVEIKR |
| 914 | Spacer + | CAAGGTCAGTCTGGATCCATTTTTTGCCATATGGGTGT |
| | PL15-0003 | TGTGGTTCCTCAGTGCGCGAATTATGGAGGTGGCTCG |
| | LC | AGCGGTGGCAGCGGTGGCTCTGGTGGTACTAGCACCT |
| | (nucleotide | CTGGTCGTTCCGCTAACCCACGTGGCGGCGGTTCTGA |
| | sequence) | CATCCAGATGACCCAGAGCCCCAGCAGCCTGTCTGCT |
| | | AGCGTGGGCGACAGAGTGACCATCACCTGTAGAGCC |
| | | AGCCAGAGCATCAGCAGCTACCTGAACTGGTATCAGC |
| | | AGAAGCCCGGCAAGGCCCCCAAACTGCTGATCTACGC |
| | | CGCCAGCTCTCTGCAGTCTGGCGTGCCCAGCAGATTT |
| | | TCCGGCAGCGGCTCTGGCACCGACTTCACCCTGACCA |
| | | TCAGCTCCCTGCAGCCCGAGGACTTCGCCACCTACTA |
| | | CTGCCAGCAGGACAACGGCTACCCCAGCACCTTTGGC |
| | | GGAGGTACCAAGGTGGAAATCAAGCGTTGTGAGGCC |
| | | ACTCACAAGACATCAACTTCACCCATTGTCAAGAGCT |
| | | TCAACAGGAATGAGTGT |
| 915 | Spacer + | QGQSGIFCHMGVVVPQCANYGGGSSGGSGGSGGTSTS |
| | PL15-0003 | GRSANPRGGGSDIQMTQSPSSLSASVGDRVTITCRASQSI |
| | LC (amino | SSYLNWYQQKPGKAPKLLIYAASSLQSGVPSRFSGSGSG |
| | acid | TDFTLTISSLQPEDFATYYCQQDNGYPSTFGGGTKVEIKR |
| | sequence) | |
| 916 | PL15-0003 | ATTTTTTGCCATATGGGTGTTGTGGTTCCTCAGTGCGC |
| | LC | GAATTATGGAGGTGGCTCGAGCGGTGGCAGCGGTGG |
| | nucleotide | CTCTGGTGGTACTAGCACCTCTGGTCGTTCCGCTAACC |
| | sequence | CACGTGGCGGCGGTTCTGACATCCAGATGACCCAGAG |
| | | CCCCAGCAGCCTGTCTGCTAGCGTGGGCGACAGAGTG |
| | | ACCATCACCTGTAGAGCCAGCCAGAGCATCAGCAGCT |
| | | ACCTGAACTGGTATCAGCAGAAGCCCGGCAAGGCCCC |
| | | CAAACTGCTGATCTACGCCGCCAGCTCTCTGCAGTCT |
| | | GGCGTGCCCAGCAGATTTTCCGGCAGCGGCTCTGGCA |
| | | CCGACTTCACCCTGACCATCAGCTCCCTGCAGCCCGA |
| | | GGACTTCGCCACCTACTACTGCCAGCAGGACAACGGC |
| | | TACCCCAGCACCTTTGGCGGAGGTACCAAGGTGGAAA |
| | | TCAAGCGTTGTGAGGCCACTCACAAGACATCAACTTC |
| | | ACCCATTGTCAAGAGCTTCAACAGGAATGAGTGT |
| 917 | PL15-0003 | IFCHMGVVVPQCANYGGGSSGGSGGSGGTSTSGRSANP |
| | LC amino | RGGGSDIQMTQSPSSLSASVGDRVTITCRASQSISSYLNW |
| | acid | YQQKPGKAPKLLIYAASSLQSGVPSRFSGSGSGTDFTLTI |
| | sequence | SSLQPEDFATYYCQQDNGYPSTFGGGTKVEIKR |
| 918 | Spacer + | CAAGGTCAGTCTGGATCCGCGTGCCATCCGCATCCTT |
| | PL16-003 | ATGATGCTCGTCCTTATTGCAATGTGGGAGGTGGCTC |
| | LC | GAGCGCTTGGCAGCGGTGGCTCTGGTGGTACTAGCACC |
| | (nucleotide | TCTGGTCGTTCCGCTAACCCACGTGGCGGCGGTTCTG |
| | sequence) | ACATCCAGATGACCCAGAGCCCCAGCAGCCTGTCTGC |
| | | TAGCGTGGGCGACAGAGTGACCATCACCTGTAGAGCC |
| | | AGCCAGAGCATCAGCAGCTACCTGAACTGGTATCAGC |
| | | AGAAGCCCGGCAAGGCCCCCAAACTGCTGATCTACGC |
| | | CGCCAGCTCTCTGCAGTCTGGCGTGCCCAGCAGATTT |
| | | TCCGGCAGCGGCTCTGGCACCGACTTCACCCTGACCA |
| | | TCAGCTCCCTGCAGCCCGAGGACTTCGCCACCTACTA |
| | | CTGCCAGCAGGACAACGGCTACCCCAGCACCTTTGGC |
| | | GGAGGTACCAAGGTGGAAATCAAGCGTTGTGAGGCC |
| | | ACTCACAAGACATCAACTTCACCCATTGTCAAGAGCT |
| | | TCAACAGGAATGAGTGT |
| 919 | Spacer + | QGQSGSACHPHPYDARPYCNVGGGSSGGSGGSGGTSTS |
| | PL16-0003 | GRSANPRGGGSDIQMTQSPSSLSASVGDRVTITCRASQSI |
| | LC (amino | SSYLNWYQQKPGKAPKLLIYAASSLQSGVPSRFSGSGSG |
| | acid | TDFTLTISSLQPEDFATYYCQQDNGYPSTFGGGTKVEIKR |
| | sequence) | |
| 920 | PL16-0003 | GCGTGCCATCCGCATCCTTATGATGCTCGTCCTTATTG |
| | LC | CAATGTGGGAGGTGGCTCGAGCGGTGGCAGCGGTGG |
| | nucleotide | CTCTGGTGGTACTAGCACCTCTGGTCTTTCCGCTAACC |
| | sequence | CACGTGGCGGCGGTTCTGACATCCAGATGACCCAGAG |
| | | CCCCAGCAGCCIGTCTGCTAGCGTGGGCGACAGAGTG |
| | | ACCATCACCTGTAGAGCCAGCCAGAGCATCAGCAGCT |
| | | ACCTGAACTGCTATCAGCAGAAGCCCGGCAAGGCCCC |
| | | CAAACTGCTGATCTACGCCGCCAGCTCTCTGCAGTCT |
| | | GGCGTGCCCAGCAGATTTTCCGGCAGCGGCTCTGGCA |
| | | CCGACTTCACCCTGACCATCAGCTCCCTGCAGCCCGA |
| | | GGACTTCGCCACCTACTACTGCCAGCAGGACAACGGC |
| | | TACCCCAGCACCTTTGGCGGAGGTACCAAGGTGGAAA |
| | | TCAAGCGTTGTGAGGCCACTCACAAGACATCAACTTC |
| | | ACCCATTGTCAAGAGCTTCAACAGGAATGAGTGT |
| 921 | PL16-0003 | ACHPHPYDARPYCNVGGGSSGGSGGSGGTSTSGRSANP |
| | LC amino | RGGGSDIQMTQSPSSLSASVGDRVTITCRASQSISSYLNW |
| | acid | YQQKPGKAPKLLIYAASSLQSGVPSRFSGSGSGTDFTLTI |
| | sequence | SSLQPEDFATYYCQQDNGYPSTFGGGTKVEIKR |
| 922 | Spacer + | CAAGGTCAGTCTGGATCCCCGTGCCATCCGGCTCCTT |
| | PL17-0003 | ATGATGCTCGTLCTTATTGCAATGTGGGAGGTGGCTC |
| | LC | GAGCGGTGGCAGCGGTGGCTCTGGTGGTACTAGCACC |
| | (nucleotide | TCTGGTCGTTCCGCTAACCCACGTGGCGGCGGTTCTG |
| | sequence) | ACATCCAGATGACCCAGAGCCCCAGCAGCCTGTCTGC |
| | | TAGCGTGGGCGACAGAGTGACCATCACCTGTAGAGCC |
| | | AGCCAGAGCATCAGCAGCTACCTGAACTGGTATCAGC |
| | | AGAAGCCCGGCAAGGCCCCCAAACTGCTGATCTACGC |
| | | CGCCAGCTCTCTGCAGTCTGGCGTGCCCAGCAGATTT |
| | | TCCGGCAGCGGCTCTGGCACCGACTTCACCCTGACCA |
| | | TCAGCTCCCTGCAGCCCGAGGACTTCGCCACCTACTA |
| | | CTGCCAGCAGGACAACGGCTACCCCAGCACCTTTGGC |
| | | GGAGGTACCAAGGTGGAAATCAAGCGTTGTGAGGCC |
| | | ACTCACAAGACATCAACTTCACCCATTGTCAAGAGCT |
| | | TCAACAGGAATGAGTGT |
| 923 | Spacer + | QGQSGSPCHPAPYDARPYCNVGGGSSGGSGGSGGTSTS |
| | PL17-0003 | GRSANPRGGGSDIQMTQSPSSLSASVGDRVTITCRASQSI |
| | LC (amino | SSYLNWYQQKPGKAPKLLIYAASSLQSGVPSRFSGSGSG |
| | acid | TDFTLTISSLQPEDFATYYCQQDNGYPSTFGGGTKVEIKR |
| | sequence) | |
| 924 | PL17-0003 | CCGTGCCATCCGGCTCCTTATGATGCTCGTCCTTATTG |
| | LC | CAATGTGGGAGGTGGCTCGAGCGGTGGCAGCGGTGG |
| | nucleotide | CTCTGGTCGTACTAGCACCTCTGGTCGTTCCGCTAACC |
| | sequence | CACGTGGCGGCGGTTCTGACATCCAGATGACCCAGAG |
| | | CCCCAGCAGCCTGTCTGCTAGCGTGGGCGACAGAGTG |
| | | ACCATCACCTGTAGAGCCAGCCAGAGCATCAGCAGCT |
| | | ACCTGAACTGGTATCAGCAGAAGCCCGGCAAGGCCCC |
| | | CAAACTGCTGATCTACGCCGCCAGCTCTCTGCAGTCT |
| | | GGCGTGCCCAGCAGATTTTCCGGCAGCGGCTCTGGCA |
| | | CCGACTTCACCCTGACCATCAGCTCCCTGCAGCCCGA |
| | | GGACTTCGCCACCTACTACTGCCAGCAGGACAACGGC |
| | | TACCCCAGCACCTTTGGCGGAGGTACCAAGGTGGAAA |
| | | TCAAGCGTTGTGAGGCCACTCACAAGACATCAACTTC |
| | | ACCCATTGTCAAGAGCTTCAACAGGAATGAGTGT |
| 925 | PL17-0003 | PCHPAPYDARPYCNVGGGSSGGSGGSGGTSTSGRSANP |
| | LC amino | RGGGSDIQMTQSPSSLSASVGDRVTITCRASQSISSYLNW |
| | acid | YQQKPGKAPKLLIYAASSLQSGVPSRFSGSGSGTDFTLTI |
| | sequence | SSLQPEDFATYYCQQDNGYPSTFGGGTKVEIKR |
| 926 | Spacer + | CAAGGTCAGTCTGGATCCCCGTGCCATCCGCATGCTT |
| | PL18-0003 | ATGATGCTCGTCCTTATTGCAATGTGGGAGGTGGCTC |
| | LC | GAGCGGTGGCAGCGGTGGCTCTGGTGGTACTAGCACC |
| | (nucleotide | TCTGGTCGTTCCGCTAACCCACGTGGCGGCGGTTCTG |
| | sequence) | ACATCCAGATGACCCAGAGCCCCAGCAGCCTGTCTGC |
| | | TAGCGTGGGCGACAGAGTGACCATCACCTGTAGAGCC |
| | | AGCCAGAGCATCAGCAGCTACCTGAACTGGTATCAGC |
| | | AGAAGCCCGGCAAGGCCCCCAAACTGCTGATCTACGC |
| | | CGCCAGCTCTCTGCAGTCTGGCGTGCCCAGCAGATTT |
| | | TCCGGCAGCGGCTCTGGCACCGACTTCACCCTGACCA |
| | | TCAGCTCCCTGCAGCCCGAGGACTTCGCCACCTACTA |
| | | CTGCCAGCAGGACAACGGCTACCCCAGCACCTTTGGC |
| | | GGAGGTACCAAGGTGGAAATCAAGCGTTGTGAGGCC |
| | | ACTCACAAGACATCAACYTCACCCATTGTCAAGAGCT |
| | | TCAACAGGAATGAGTGT |
| 927 | Spacer + | QGQSGSPCHPHAYDARPYCNVGGGSSGGSGGSGGTSTS |
| | PL18-0003 | GRSANPRGGGSDIQMTQSPSSLSASVGDRVTITCRASQSI |
| | LC (amino | SSYLNWYQQKPGKAPKLLIYAASSLQSGVPSRFSGSGSG |
| | acid | TDFTLTISSLQPEDFATYYCQQDNGYPSTFGGGTKVEIKR |
| | sequence) | |
| 928 | PL18-0003 | CCGTGCCATCCGCATGCTTATGATGCTCGTCCTTATTG |
| | LC | CAATGTGGGAGGTGGCTCGAGCGGTGGCAGCGGTGG |
| | nucleotide | CTCTGGTGGTACTAGCACCTCTGGTCGTTCCGCTAACC |
| | sequence | CACGTGGCGGCGGTTCTGACATCCAGATGACCCAGAG |
| | | CCCCAGCAGCCTGTCTGCTAGCGTGGGCGACAGAGTG |
| | | ACCATCACCTGTAGAGCCAGCCAGAGCATCAGCAGCT |
| | | ACCTGAACTGGTATCAGCAGAAGCCCGGCAAGGCCCC |
| | | CAAACTGCTGATCTACGCCGCCAGCTCTCTGCAGTCT |
| | | GGCGTGCCCAGCAGATTTTCCGGCAGCGGCTCTGGCA |
| | | CCGACTTCACCCTGACCATCAGCTCCCTGCAGCCCGA |
| | | GGACTTCGCCACCTACTACTGCCAGCAGGACAACGGC |
| | | TACCCCAGCACCTTTGGCGGAGGTACCAAGGTGGAAA |
| | | TCAAGCGTTGTGAGGCCACTCACAAGACATCAACTTC |
| | | ACCCATTGTCAAGAGCTTCAACAGGAATGAGTGT |
| 929 | PL18-0003 | PCHPHAYDARPYCNVGGGSSGGSGGSGGTSTSGRSANP |
| | LC amino | RGGGSDIQMTQSPSSLSASVGDRVTITCRASQSISSYLNW |
| | acid | YQQKPGKAPKLLIYAASSLQSGVPSRFSGSGSGTDFTLTI |
| | sequence | SSLQPEDFATYYCQQDNGYPSTFGGGTKVEIKR |
| 930 | Spacer + | CAAGGTCAGTCTGGATCCCCGTGCCATCCGCATCCTG |
| | PL19-0003 | CTGATGCTCGTCCTTATTGCAATGTGGGAGGTGGCTC |
| | LC | GAGCGGTGGCAGCGGTGGCTCTGGTGGTACTAGCACC |
| | (nucleotide | TCTGGTCGTTCCGCTAACCCACGTGGCGGCGGTTCTG |
| | sequence) | ACATCCAGATGACCCAGAGCCCCAGCAGCCTGTCTGC |
| | | TAGCGTGGGCGACAGAGTGACCATCACCTGTAGAGCC |
| | | AGCCAGAGCATCAGCAGCTACCTGAACTGGTATCAGC |
| | | AGAAGCCCGGCAAGGCCCCCAAACTGCTGATCTACGC |
| | | CGCCAGCTCTCTGCAGTCTGGCGTGCCCAGCAGATTT |
| | | TCCGGCAGCGGCTCTGGCACCGACTTCACCCTGACCA |
| | | TCAGCTCCCTGCAGCCCGAGGACTTCGCCACCTACTA |
| | | CTGCCAGCAGGACAACGGCTACCCCAGCACCTTTGGC |
| | | GGAGGTACCAAGGTGGAAATCAAGCGTTGTGAGGCC |
| | | ACTCACAAGACATCAACTTCACCCATTGTCAAGAGCT |
| | | TCAACAGGAATGAGTGT |
| 931 | Spacer + | QGQSGSPCHPHPADARPYCNVGGGSSGGSGGSGGTSTS |
| | PL19-0003 | GRSANPRGGGSDIQMTQSPSSLSASVGDRVTITCRASQSI |
| | LC (amino | SSYLNWYQQKPGKAPKLLIYAASSLQSGVPSRFSGSGSG |
| | acid | TDFTLTISSLQPEDFATYYCQQDNGYPSTFGGGTKVEIKR |
| | sequence) | |
| 932 | PL19-0003 | CCGTGCCATCCGCATCCTGCTGATGCTCGTCCTTATTG |
| | LC | CAATGTGGGAGGTGGCTCGAGCGGTGGCAGCGGTGG |
| | nucleotide | CTCTGGTGGTACTAGCACCTCTGGTCGTTCCGCTAACC |
| | sequence | CACGTGGCGGCGGTTCTGACATCCAGATGACCCAGAG |
| | | CCCCAGCAGCCTGTCTGCTACTCGTGGGCGACAGAGTG |
| | | ACCATCACCTGTAGAGCCAGCCAGAGCATCAGCAGCT |
| | | ACCTGAACTGGTATCAGCAGAAGCCCGGCAAGGCCCC |
| | | CAAACTGCTGATCTACGCCGCCAGCTCTCTGCAGTCT |
| | | GGCGTGCCCAGCAGATTTTCCGGCAGCGGCTCTGGCA |
| | | CCGACTTCACCCTGACCATCAGCTCCCTGCAGCCCGA |
| | | GGACTTCGCCACCTACTACTGCCAGCAGGACAACGGC |
| | | TACCCCAGCACCTTTGGCGGAGGTACCAAGGTGGAAA |
| | | TCAAGCGTTGTGAGGCCACTCACAAGACATCAACTTC |
| | | ACCCATTGTCAAGAGCTTCAACAGGAATGAGTGT |
| 933 | PL19-0003 | PCHPHPADARPYCNVGGGSSGGSGGSGGTSTSGRSANP |
| | LC amino | RGGGSDIQMTQSPSSLSASVGDRVTITCRASQSISSYLNW |
| | acid | YQQKPGKAPKLLIYAASSLQSGVPSRFSGSGSGTDFTLTI |
| | sequence | SSLQPEDFATYYCQQDNGYPSTFGGGTKVEIKR |
| 934 | Spacer + | CAAGGTCAGTCTGGATCCCCGTGCCATCCGCATCCTT |
| | PL20-0003 | ATGCTGCTCGTCCTTATTGCAATGTGGGAGGTGGCTC |
| | LC | GAGCGGTGGCAGCGGTGGCTCTGGTGGTACTAGCACC |
| | (nucleotide | TCTGGTCGTTCCGCTAACCCACGTGGCGGCGGTTCTG |
| | sequence) | ACATCCAGATGACCCAGAGCCCCAGCAGCCTGTCTGC |
| | | TAGCGTGGGCGACAGAGTGACCATCACCTGTAGAGCC |
| | | AGCCAGAGCATCAGCAGCTACCTGAACTGGTATCAGC |
| | | AGAAGCCCGGCAAGGCCCCCAAACTGCTGATCTACGC |
| | | CGCCAGCTCTCTGCAGTCTGGCGTGCCCAGCAGATTT |
| | | TCCGGCAGCGGCTCTGGCACCGACTTCACCCTGACCA |
| | | TCAGCTCCCTGCAGCCCGAGGACTTCGCCACCTACTA |
| | | CTGCCAGCAGGACAACGGCTACCCCAGCACCTTTGGC |
| | | GGAGGTACCAAGGTGGAAATCAAGCGTTGTGAGGCC |
| | | ACTCACAAGACATCAACTTCACCCATTGTCAAGAGCT |
| | | TCAACAGGAATGAGTGT |
| 935 | Spacer + | QGQSGSPCHPHPYAARPYCNVGGGSSGGSGGSGGTSTS |
| | PL20-0003 | GRSANPRGGGSDIQMTQSPSSLSASVGDRVTITCRASQSI |
| | LC (amino | SSYLNWYQQKPGKAPKLLIYAASSLQSGVPSRFSGSGSG |
| | acid | TDFTLTISSLQPEDFATYYCQQDNGYPSTFGGGTKVEIKR |
| | sequence) | |
| 936 | PL20-0003 | CCGTGCCATCCGCATCCTTATGCTGCTCGTCCTTATTG |
| | LC | CAATGTGGGAGGTGGCTCGAGCGGTGGCAGCGGTGG |
| | nucleotide | CTCTGGTGGTACTAGCACCTCTGGTCGTTCCGCTAACC |
| | sequence | CACGTGGCGGCGGTTCTGACATCCAGATGACCCAGAG |
| | | CCCCAGCAGCCTGTCTGCTAGCGTGGGCGACAGAGTG |
| | | ACCATCACCTGTAGAGCCAGCCAGAGCATCAGCAGCT |
| | | ACCTGAACTGGTATCAGCAGAAGCCCGGCAAGGCCCC |
| | | CAAACTGCTGATCTACGCCGCCAGCTCTCTGCAGTCT |
| | | GGCGTGCCCAGCAGATTTTCCGGCAGCGGCTCTGGCA |
| | | CCGACTTCACCCTGACCATCAGCTCCCTGCAGCCCGA |
| | | GGACTTCGCCACCTACTACTGCCAGCAGGACAACGGC |
| | | TACCCCAGCACCTTTGGCGGAGGTACCAAGGTGGAAA |
| | | TCAAGCGTTGTGAGGCCACTCACAAGACATCAACTTC |
| | | ACCCATTGTCAAGAGCTTCAACAGGAATGAGTGT |
| 937 | PL20-0003 | PCHPHPYAARPYCNVGGGSSGGSGGSGGTSTSGRSANP |
| | LC amino | RGGGSDIQMTQSPSSLSASVGDRVTITCRASQSISSYLNW |
| | acid | YQQKPGKAPKLLIYAASSLQSGVPSRFSGSGSGTDFTLTI |
| | sequence | SSLQPEDFATYYCQQDNGYPSTFGGGTKVEIKR |
| 938 | Spacer + | CAAGGTCAGTCTGGATCCCCGTGCCATCCGCATCCTT |
| | PL21-0003 | ATGATGCTGCTCCTTATTGCAATGTGGGAGGTGGCTC |
| | LC | GAGCGGTGGCAGCGGTGGCTCTGGTGGTACTAGCACC |
| | (nucleotide | TCTGGTCGTTCCGCTAACCCACGTGGCGGCGGTTCTG |
| | sequence) | ACATCCAGATGACCCAGAGCCCCAGCAGCCTGTCTGC |
| | | TAGCGTGGGCGACAGAGTGACCATCACCTGTAGAGCC |
| | | AGCCAGAGCATCAGCAGCTACCTGAACTGGTATCAGC |
| | | AGAAGCCCGGCAAGGCCCCCAAACTGCTGATCTACGC |
| | | CGCCAGCTCTCTGCAGTCTGGCGTGCCCAGCAGATTT |
| | | TCCGGCAGCGGCTCTGGCACCGACTTCACCCTGACCA |
| | | TCAGCTCCCTGCAGCCCGAGGACTTCGCCACCTACTA |
| | | CTGCCAGCAGGACAACGGCTACCCCAGCACCTTTGGC |
| | | GGAGGTACCAAGGTGGAAATCAAGCGTTGTGAGGCC |
| | | ACTCACAAGACATCAACTTCACCCATTGTCAAGAGCT |
| | | TCAACAGGAATGAGTGT |
| 939 | Spacer + | QGQSGSPCHPHPYAARPYCNVGGGSSGGSGGSGGTSTS |
| | PL21-0003 | GRSANPRGGGSDIQMTQSPSSLSASVGDRVTITCRASQSI |
| | LC (amino | SSYLNWYQQKPGKAPKLLIYAASSLQSGVPSRFSGSGSG |
| | acid | TDFTLTISSLQPEDFATYYCQQDNGYPSTFGGGTKVEIKR |
| | sequence) | |
| 940 | PL21-003 | CCGTGCCATCCGCATCCTTATGATGCTGCTCCTTATTG |
| | LC | CAATGTGGGAGGTGGCTCGAGCGGTGGCAGCGGTGG |
| | nucleotide | CTCTGGTGGTACTAGCACCTCTGGTCGTTCCGCTAACC |
| | sequence | CACGTGGCGGCGGTTCTGACATCCAGATGACCCAGAG |
| | | CCCCAGCAGCCTGTCTGCTAGCGTGGGCGACAGAGTG |
| | | ACCATCACCTGTAGAGCCAGCCAGAGCATCAGCAGCT |
| | | ACCTGAACTGGTATCAGCAGAAGCCCGGCAAGGCCCC |
| | | CAAACTGCTGATCTACGCCGCCAGCTCTCTGCAGTCT |
| | | GGCGTGCCCAGCAGATTTTCCGGCAGCGGCTCTGGCA |
| | | CCGACTTCACCCTGACCATCAGCTCCCTGCAGCCCGA |
| | | GGACTTCGCCACCTACTACTGCCAGCAGGACAACGGC |
| | | TACCCCAGCACCTTTGGCGGAGGTACCAAGGTGGAAA |
| | | TCAAGCGTTGTGAGGCCACTCACAAGACATCAACTTC |
| | | ACCCATTGTCAAGAGCTTCAACAGGAATGAGTGT |
| 941 | PL21-0003 | PCHPHPYDAAPYCNVGGGSSGGSGGSGGTSTSGRSANP |
| | LC amino | RGGGSDIQMTQSPSSLSASVGDRVTITCRASQSISSYLNW |
| | acid | YQQKPGKAPKLLIYAASSLQSGVPSRFSGSGSGTDFTLTI |
| | sequence | SSLQPEDFATYYCQQDNGYPSTFGGGTKVEIKR |
| 942 | Spacer + | CAAGGTCAGTCTGGATCCCCGTGCCATCCGCATCCTT |
| | PL22-0003 | ATGATGCTCGTCCTGCTTGCAATGTGGGAGGTGGCTC |
| | LC | GAGCGGTGGCAGCGGTGGCTCTGGTGGTACTAGCACC |
| | (nucleotide | TCTGGTCGTTCCGCTAACCCACGTGGCGGCGGTTCTG |
| | sequence) | ACATCCAGATGACCCAGAGCCCCAGCAGCCTGTCTGC |
| | | TAGCGTGGGCGACAGAGTGACCATCACCTGTAGAGCC |
| | | AGCCAGAGCATCAGCAGCTACCTGAACTGGTATCAGC |
| | | AGAAGCCCGGCAAGGCCCCCAAACTGCTGATCTACGC |
| | | CGCCAGCTCTCTGCAGTCTGGCGTGCCCAGCAGATTT |
| | | TCCGGCAGCGGCTCTGGCACCGACTTCACCCTGACCA |
| | | TCAGCTCCCTGCAGCCCGAGGACTTCGCCACCTACTA |
| | | CTGCCAGCAGGACAACGGCTACCCCAGCACCTTTGGC |
| | | GGAGGTACCAAGGTGGAAATCAAGCGTTGTGAGGCC |
| | | ACTCACAAGACATCAACTTCACCCATTGTCAAGAGCT |
| | | TCAACAGGAATGAGTGT |
| 943 | Spacer + | QGQSGSPCHPHPYAARPYCNVGGGSSGGSGGSGGTSTS |
| | PL22-0003 | GRSANPRGGGSDIQMTQSPSSLSASVGDRVTITCRASQSI |
| | LC (amino | SSYLNWYQQKPGKAPKLLIYAASSLQSGVPSRFSGSGSG |
| | acid | TDFTLTISSLQPEDFATYYCQQDNGYPSTFGGGTKVEIKR |
| | sequence) | |
| 944 | PL22-0003 | CCGTGCCATCCGCATCCTTATGATGCTCGTCCTGCTTG |
| | LC | CAATGTGGGAGGTGGCTCGAGCGGTGGCAGCGGTGG |
| | nucleotide | CTCTGGTGGTACTAGCACCTCTGGTCGTTCCGCTAACC |
| | sequence | CACGTGGCGGCGGTTCTGACATCCAGATGACCCAGAG |
| | | CCCCAGCAGCCTGTCTGCTAGCGTGGGCGACAGAGTG |
| | | ACCATCACCTGTAGAGCCAGCCAGAGCATCAGCAGCT |
| | | ACCTGAACTGGTATCAGCAGAAGCCCGGCAAGGCCCC |
| | | CAAACTGCTGATCTACGCCGCCAGCTCTCTGCAGTCT |
| | | GGCGTGCCCAGCAGATTTTCCGGCAGCGGCTCTGGCA |
| | | CCGACTTCACCCTGACCATCAGCTCCCTGCAGCCCGA |
| | | GGACTTCGCCACCTACTACTGCCAGCAGGACAACGGC |
| | | TACCCCAGCACCTTTGGCGGAGGTACCAAGGTGGAAA |
| | | TCAAGCGTTGTGAGGCCACTCACAAGACATCAACTTC |
| | | ACCCATTGTCAAGAGCTTCAACAGGAATGAGTGT |
| 945 | PL22-0003 | PCHPHPYDARPACNVGGGSSGGSGGSGGTSTSGRSANP |
| | LC amino | RGGGSDIQMTQSPSSLSASVGDRVTITCRASQSISSYLNW |
| | acid | YQQKPGKAPKLLIYAASSLQSGVPSRFSGSGSGTDFTLTI |
| | sequence | SSLQPEDFATYYCQQDNGYPSTFGGGTKVEIKR |
| 946 | Spacer + | CAAGGTCAGTCTGGATCCCCGTGCCATCCGCATCCTT |
| | PL23-0003 | ATGATGCTCGTCCTTATTGCGCTGTGGGAGGTGGCTC |
| | LC | GAGCGGTGGCAGCGGTGGCTCTGGTGGTACTAGCACC |
| | (nucleotide | TCTGGTCGTTCCGCTAACCCACGTGGCGGCGGTTCTG |
| | sequence) | ACATCCAGATGACCCAGAGCCCCAGCAGCCTGTCTGC |
| | | TAGCGTGGGCGACAGAGTGACCATCACCTGTAGAGCC |
| | | AGCCAGAGCATCAGCAGCTACCTGAACTGGTATCAGC |
| | | AGAAGCCCGGCAAGGCCCCCAAACTGCTGATCTACGC |
| | | CGCCAGCTCTCTGCAGTCTGGCGTGCCCAGCAGATTT |
| | | TCCGGCAGCGGCTCTGGCACCGACTTCACCCTGACCA |
| | | TCAGCTCCCTGCAGCCCGAGGACTTCGCCACCTACTA |
| | | CTGCCAGCAGGACAACGGCTACCCCAGCACCTTTGGC |
| | | GGAGGTACCAAGGTGGAAATCAAGCGTTGTGAGGCC |
| | | ACTCACAAGACATCAACTTCACCCATTGTCAAGAGCT |
| | | TCAACAGGAATGAGTGT |
| 947 | Spacer + | QGQSGSPCHPHPYDARPYCAVGGGSSGGSGGSGGTSTS |
| | PL23-0003 | GRSANPRGGGSDIQMTQSPSSLSASVGDRVTITCRASQSI |
| | LC (amino | SSYLNWYQQKPGKAPKLLIYAASSLQSGVPSRFSGSGSG |
| | acid | TDFTLTISSLQPEDFATYYCQQDNGYPSTFGGGTKVEIKR |
| | sequence) | |
| 948 | PL23-0003 | CCGTGCCATCCGCATCCTTATGATGCTCGTCCTTATTG |
| | LC | CGCTGTGGGAGGTGGCTCGAGCGGTGGCAGCGGTGG |
| | nucleotide | CTCGGTGGTACTAGCACCTCTGGTCGTTCCGCTAACC |
| | sequence | CACGTGGCGGCGGTTCTGACATCCAGATGACCCAGAG |
| | | CCCCAGCAGCCTGTCTGCTAGCGTGGGCGACAGAGTG |
| | | ACCATCACCTGTAGAGCCAGCCAGAGCATCAGCAGCT |
| | | ACCTGAACTGGTATCAGCAGAAGCCCGGCAAGGCCCC |
| | | CAAACTGCTGATCTACGCCGCCAGCTCTCTGCAGTCT |
| | | GGCGTGCCCAGCAGATTTTCCGGCAGCGGCTCTGGCA |
| | | CCGACTTCACCCTGACCATCAGCTCCCTGCAGCCCGA |
| | | GGACTTCGCCACCTACTACTGCCAGCAGGACAACGGC |
| | | TACCCCAGCACCTTTGGCGGAGGTACCAAGGTGGAAA |
| | | TCAAGCGTTGTGAGGCCACTCACAAGACATCAACTTC |
| | | ACCCATTGTCAAGAGCTTCAACAGGAATGAGTGT |
| 949 | PL23-0003 | PCHPHPYDARPYCAVGGGSSGGSGGSGGTSTSGRSANP |
| | LC amino | RGGGSDIQMTQSPSSLSASVGDRVTITCRASQSISSYLNW |
| | acid | YQQKPGKAPKLLIYAASSLQSGVPSRFSGSGSGTDFTLTI |
| | sequence | SSLQPEDFATYYCQQDNGYPSTFGGGTKVEIKR |
| 950 | Spacer + | CAAGGTCAGTCTGGATCCCCGTGCCATGCGCATCCTT |
| | PL24-0003 | ATGATGCTCGTCCTTATTCCAATGIGGGAGGTGGCTC |
| | LC | GAGCGGTGGCAGCGGTGGCTCTGGTGGTACTAGCACC |
| | (nucleotide | TCTGGTCGTTCCGCTAACCCACGTGGCGGCGGTTCTG |
| | sequence) | ACATCCAGATGACCCAGAGCCCCAGCAGCCTGTCTGC |
| | | TAGCGTGGGCGACAGAGTGACCATCACCTGTAGAGCC |
| | | AGCCAGAGCATCAGCAGCTACCTGAACTGGTATCAGC |
| | | AGAAGCCCGGCAAGGCCCCCAAACTGCTGATCTACGC |
| | | CGCCAGCTCTCTGCAGTCTGGCGTGCCCAGCAGATTT |
| | | TCCGGCAGCCGCTCTGGCACCGACTTCACCCTGACCA |
| | | TCAGCTCCCTGCAGCCCGAGGACTTCGCCACCTACTA |
| | | CTGCCAGCAGGACAACGGCTACCCCAGCACCTTTGGC |
| | | GGAGGTACCAAGGTGGAAATCAAGCGTTGTGAGGCC |
| | | ACTCACAAGACATCAACTTCACCCATTGTCAAGAGCT |
| | | TCAACAGGAATGAGTGT |
| 951 | Spacer + | QGQSGSPCHAHPYDARPYCNVGGGSSGGSGGSGGTSTS |
| | PL24-0003 | GRSANPRGGGSDIQMTQSPSSLSASVGDRVTITCRASQSI |
| | LC (amino | SSYLNWYQQKPGKAPKLLIYAASSLQSGVPSRFSGSGSG |
| | acid | TDFTLTISSLQPEDFATYYCQQDNGYPSTFGGGTKVEIKR |
| | sequence) | |
| 952 | PL24-0003 | CCGTGCCATGCGCATCCTTATGATGCTCGTCCTTATTG |
| | LC | CAATGTGGGAGGTGGCTCGAGCGGTGGCAGCGGTGG |
| | nucleotide | CTCTGGTGGTACTAGCACCTCTGGTCGTTCCGCTAACC |
| | sequence | CACGTGGCGGCGGTTCTGACATCCAGATGACCCAGAG |
| | | CCCCAGCAGCCTGTCTGCTAGCGTGGGCGACAGAGTG |
| | | ACCATCACCTGTAGAGCCAGCCAGAGCATCAGCAGCT |
| | | ACCTGAACTGGTATCAGCAGAAGCCCGGCAAGGCCCC |
| | | CAAACTGCTGATCTACGCCGCCAGCTCTCTCCAGTCT |
| | | GGCGTGCCCAGCAGATTTTCCGGCAGCGGCTCTGGCA |
| | | CCGACTTCACCCTGACCATCAGCTCCCTGCAGCCCGA |
| | | GGACTTCGCCACCTACTACTGCCAGCAGGACAACGGC |
| | | TACCCCAGCACCTTTGGCGGAGGTACCAAGGTGGAAA |
| | | TCAAGCGTTGTGAGGCCACTCACAAGACATCAACTTC |
| | | ACCCATTGTCAAGAGCTTCAACAGGAATGAGTGT |
| 953 | PL24-0003 | PCHAHPYDARPYCNVGGGSSGGSGGSGGTSTSGRSANP |
| | LC amino | RGGGSDIQMTQSPSSLSASVGDRVTITCRASQSISSYLNW |
| | acid | YQQKPGKAPKLLIYAASSLQSGVPSRFSGSGSGTDFTLTI |
| | sequence | SSLQPEDFATYYCQQDNGYPSTFGGGTKVEIKR |
| 954 | Spacer + | CAAGGTCAGTCTGGATCCCCGTGCCATCCGCATCCTT |
| | PL25-0003 | ATGATGCTCGTGCTTATTGCAATGTGGGAGGTGGCTC |
| | LC | GAGCGGTGGCAGCGGTGGCTCTGGTGGTACTAGCACC |
| | (nucleotide | TCTGGTCGTTCCGCTAACCCACGTGGCGGCGGTTCTG |
| | sequence) | ACATCCAGATGACCCAGAGCCCCAGCAGCCTGTCTGC |
| | | TAGCGTGGGCGACAGAGTGACCATCACCTGTAGAGCC |
| | | AGCCAGAGCATCAGCAGCTACCTGAACTGGTATCAGC |
| | | AGAAGCCCGGCAAGGCCCCCAAACTGCTGATCTACGC |
| | | CGCCAGCTCTCTGCAGTCTGGCGTGCCCAGCAGATTT |
| | | TCCGGCAGCGGCTCTGGCACCGACTTCACCCTGACCA |
| | | TCAGCTCCCTGCAGCCCGAGGACTTCGCCACCTACTA |
| | | CTGCCAGCAGGACAACGGCTACCCCAGCACCTTTGGC |
| | | GGAGGTACCAAGGTGGAAATCAAGCGTTGTGAGGCC |
| | | ACTCACAAGACATCAACTTCACCCATTGTCAAGAGCT |
| | | TCAACAGGAATGAGTGT |
| 955 | Spacer + | QGQSGSPCHPHPYDARAYCNVGGGSSGGSGGSGGTSTS |
| | PL25-0003 | GRSANPRGGGSDIQMTQSPSSLSASVGDRVTITCRASQSI |
| | LC (amino | SSYLNWYQQKPGKAPKLLIYAASSLQSGVPSRFSGSGSG |
| | acid | TDFTLTISSLQPEDFATYYCQQDNGYPSTFGGGTKVEIKR |
| | sequence) | |
| 956 | PL25-003 | CCGTGCCATCCGCATCCTTATGATGCTCGTGCTTATTG |
| | LC | CAATGTGGGAGGTGGCTCGAGCGGTGGCAGCGGTGG |
| | nucleotide | CTCTGGTGGTACTAGCACCTCTGGTCGTTCCGCTAACC |
| | sequence | CACGTGGCGGCGGTTCTGACATCCAGATGACCCAGAG |
| | | CCCCAGCAGCCTGTCTGCTAGCGTGGGCGACAGAGTG |
| | | ACCATCACCTGTAGAGCCAGCCAGAGCATCAGCAGCT |
| | | ACCTGAACTGGTATCAGCAGAAGCCCGGCAAGGCCCC |
| | | CAAACTGCTGATCTACGCCGCCAGCTCTCTGCAGTCT |
| | | GGCGTGCCCAGCAGATTTTCCGGCAGCGGCTCTGGCA |
| | | CCGACTTCACCCTGACCATCAGCTCCCTGCAGCCCGA |
| | | GGACTTCGCCACCTACTACTGCCAGCAGGACAACGGC |
| | | TACCCCAGCACCTTTGGCGGAGGTACCAAGGTGGAAA |
| | | TCAAGCGTTGTGAGGCCACTCACAAGACATCAACTTC |
| | | ACCCATTGTCAAGAGCTTCAACAGGAATGAGTGT |
| 957 | PL25-0003 | PCHPHPYDARAYCNVGGGSSGGSGGSGGTSTSGRSANP |
| | LC amino | RGGGSDIQMTQSPSSLSASVGDRVTITCRASQSISSYLNW |
| | acid | YQQKPGKAPKLLIYAASSLQSGVPSRFSGSGSGTDFTLTI |
| | sequence | SSLQPEDFATYYCQQDNGYPSTFGGGTKVEIKR |
| 958 | Spacer + | CAAGGTCAGTCTGGATCCGGAGGTGGCTCGAGCGGTG |
| | PL03-2001 | GCAGCGGTGGCTCTGGTGGTATTAGCAGTGGTCTGTT |
| | LC | AAGCGGTCGTAGCGATAATCATGGCGGTTCTGACATC |
| | (nucleotide | CAGATGACCCAGAGCCCCAGCAGCCTGTCTGCTAGCG |
| | sequence) | TGGGCGACAGAGTGACCATCACCTGTAGAGCCAGCCA |
| | | GAGCATCAGCAGCTACCTGAACTGGTATCAGCAGAAG |
| | | CCCGGCAAGGCCCCCAAACTGCTGATCTACGCCGCCA |
| | | GCTCTCTGCAGTCTGGCGTGCCCAGCAGATTTTCCGG |
| | | CAGCGGCTCTGGCACCGACTTCACCCTGACCATCAGC |
| | | TCCCTGCAGCCCGAGGACTTCGCCACCTACTACTGCC |
| | | AGCAGGACAACGGCTACCCCAGCACCTTTGGCGGAG |
| | | GTACCAAGGTGGAAATCAAGCGTTGTGAGGCCACTCA |
| | | CAAGACATCAACTTCACCCATTGTCAAGAGCTTCAAC |
| | | AGGAATGAGTGT |
| 959 | Spacer + | QGQSGSLCEVLMLLQHPWCMGGGGSSGGSGGSGGISSG |
| | PL03-2001 | LLSGRSDNHGGSDIQMTQSPSSLSASVGDRVTITCRASQS |
| | LC (amino | ISSYLNWYQQKPGKAPKLLIYAASSLQSGVPSRFSGSGS |
| | acid | GTDFILTISSLQPEDFATYYCQQDNGYPSTFGGGTKVEI |
| | sequence) | KR |
| 960 | PL03-2001 | GGAGGTGGCTCGAFCGGTGGCAGCGGTGGCTCTGGTG |
| | LC | GTATTAGCAGTGGTCTGTTAAGCGGTCGTAGCGATAA |
| | nucleotide | TCATGGCGGTTCTGACATCCAGATGACCCAGAGCCCC |
| | sequence | AGCAGCCTGTCTGCTAGCGTGGGCGACAGAGTGACCA |
| | | TCACCTGTAGAGCCAGCCAGAGCATCAGCAGCTACCT |
| | | GAACTGGTATCAGCAGAAGCCCGGCAAGGCCCCCAA |
| | | ACTGCTGATCTACGCCGCCAGCTCTCTGCAGTCTGGC |
| | | GTGCCCAGCAGATTTTCCGGCAGCGGCTCTGGCACCG |
| | | ACTTCACCCTGACCATCAGCTCCCTGCAGCCCGAGGA |
| | | CTTCGCCACCTACTACTGCCAGCAGGACAACGGCTAC |
| | | CCCAGCACCTTTGGCGGAGGTACCAAGGTGGAAATCA |
| | | AGCGTTGTGAGGCCACTCACAAGACATCAACTTCACC |
| | | CATTGTCAAGAGCTTCAACAGGAATGAGTGT |
| 961 | PL03-2001 | LCEVLMLLQHPWCMGGGGSSGGSGGSGGISSGLLSGRS |
| | LC amino | DNHGGSDIQMTQSPSSLSASVGDRVTITCRASQSISSYLN |
| | acid | WYQQKPGKAPKLLIYAASSLQSGVPSRFSGSGSGTDFTL |
| | sequence | TISSLQPEDFATYYCQQDNGYPSTFGGGTKVEIKR |
| 962 | Spacer + | QGQSGSIACRHFMEQLPFCHHGGGSSGGSGGSGGISSGL |
| | PL04-2001 | LSGRSDNHGGSDIQMTQSPSSLSASVGDRVTITCRASQSI |
| | LC (amino | SSYLNWYQQKPGKAPKLLIYAASSLQSGVPSRFSGSGSG |
| | acid | TDFTLTISSLQPEDFATYYCQQDNGYPSTFGGGTKVEIKR |
| | sequence) | |
| 963 | PL04-2001 | IACRHFMEQLPFCHHGGGSSGGSGGSGGISSGLLSGRSD |
| | LC amino | NHGGSDIQMTQSPSSLSASVGDRVTITCRASQSISSYLNW |
| | acid | YQQKPGKAPKLLIYAASSLQSGVPSRFSGSGSGTDFTLTI |
| | sequence | SSLQPEDFATYYCQQDNGYPSTFGGGTKVEIKR |
| 964 | Spacer + | CAAGGTCAGTCTGGATCCGGAGGTGGCTCGAGCGGTG |
| | PL06-2001- | GCAGCGGTGGCTCTGGTGGTATTAGCAGTGGTCTGTT |
| | mk LC | AAGCGGTCGTAGCGATAATCATGGCGGTTCTGACATC |
| | (nucleotide | CAGATGACCCAGAGCCCCAGCAGCCTGTCTGCTAGCG |
| | sequence) | TGGGCGACAGAGTGACCATCACCTGTAGAGCCAGCCA |
| | | GAGCATCAGCAGCTACCTGAACTGGTATCAGCAGAAG |
| | | CCCGGCAAGGCCCCCAAACTGCTGATCTACGCCGCCA |
| | | GCTCTCTGCAGTCTGGCGTGCCCAGCAGATTTTCCGG |
| | | CAGCGGCTCTGGCACCGACTTCACCCTGACCATCAGC |
| | | TCCCTGCAGCCCGAGGACTTCGCCACCTACTACTGCC |
| | | AGCAGGACAACGGCTACCCCAGCACCTTTGGCGGAG |
| | | GTACCAAGGTGGAAATCAAGCGTTGTGAGGCCACTCA |
| | | CAAGACATCAACTTCACCCATTGTCAAGAGCTTCAAC |
| | | AGGAATGAGTGT |
| 965 | Spacer + | QGQSGSILYCDSWGAGCLTRPGGGSSGGSGGSGGISSGL |
| | PL06-2001- | LSGRSDNHGGSDIQMTQSPSSLSASVGDRVTITCRASQSI |
| | mk LC | SSYLNWYQQKPGKAPKLLIYAASSLQSGVPSRFSGSGSG |
| | (amino acid | TDFTLTISSLQPEDFATYYCQQDNGYPSTFGGGTKVEIKR |
| | sequence) | |
| 966 | PL06-2001- | GGAGGTGGCTCGAGCGGTGGCAGCGGTGGCTCTGGTG |
| | mk LC | GTATTAGCAGTGGTCTGTTAAGCGGTCGTAGCGATAA |
| | nucleotide | TCATGGCGGTTCTGACATCCAGATGACCCAGAGCCCC |
| | sequence | AGCAGCCTGTCTGCTAGCGTGGGCGACAGAGTGACCA |
| | | TCACCTGTAGAGCCAGCCAGAGCATCAGCAGCTACCT |
| | | GAACTGGTATCAGCAGAAGCCCGGCAAGGCCCCCAA |
| | | ACTGCTGATCTACGCCGCCAGCTCTCTGCAGTCTGGC |
| | | GTGCCCAGCAGATTTTCCGGCAGCGGCTCTGGCACCG |
| | | ACTTCACCCTGACCATCAGCTCCCTGCAGCCCGAGGA |
| | | CTTCGCCACCTACTACTGCCAGCAGGACAACGGCTAC |
| | | CCCAGCACCTTTGGCGGAGGTACCAAGGTGGAAATCA |
| | | AGCGTTGTGAGGCCACTCACAAGACATCAACTTCACC |
| | | CATTGTCAAGAGCTTCAACAGGAATGAGTGT |
| 967 | PL06-2001- | ILYCDSWGAGCLTRPGGGSSGGSGGSGGISSGLLSGRSD |
| | mk LC | NHGGSDIQMTQSPSSLSASVGDRVTITCRASQSISSYLNW |
| | amino acid | YQQKPGKAPKLLIYAASSLQSGVPSRFSGSGSGTDFTLTI |
| | sequence | SSLQPEDFATYYCQQDNGYPSTFGGGTKVEIKR |
| 968 | Spacer + | CAAGGTCAGTCTGGATCCGGAGGTGGCTCGAGCGGTG |
| | PL07-2001 | GCAGCGGTGGCTCTGGTGGTATTAGCAGTGGTCTGTT |
| | LC | AAGCGGTCGTAGCGATAATCATGGCGGTTCTGACATC |
| | (nucleotide | CAGATGACCCAGAGCCCCAGCAGCCTGTCTGCTAGCG |
| | sequence) | TGGGCGACAGAGTGACCATCACCTGTAGAGCCAGCCA |
| | | GAGCATCAGCAGCTACCTGAACTGGTATCAGCAGAAG |
| | | CCCGGCAAGGCCCCCAAACTGCTGATCTACGCCGCCA |
| | | GCTCTCTGCAGTCTGGCGTGCCCAGCAGATTTTCCGG |
| | | CAGCGGCTCTGGCACCGACTTCACCCTGACCATCAGC |
| | | TCCCTGCAGCCCGAGGACTTCGCCACCTACTACTGCC |
| | | AGCAGGACAACGGCTACCCCAGCACCTTTGGCGGAG |
| | | GTACCAAGGTGGAAATCAAGCGTTGTGAGGCCACTCA |
| | | CAAGACATCAACTTCACCCATTGTCAAGAGCTTCAAC |
| | | AGGAATGAGTGT |
| 969 | Spacer + | QGQSGSGIALCPSHFCQLPQTGGGSSGGSGGSGGISSGLL |
| | PL07-2001 | SGRSDNHGGSDIQMTQSPSSLSASVGDRVTITCRASQSIS |
| | LC (amino | SYLNWYQQKPGKAPKLLIYAASSLQSGVPSRFSGSGSGT |
| | acid | DFTLTISSLQPEDFATYYCQQDNGYPSTFGGGTKVEIKR |
| | sequence) | |
| 970 | PL07-2001 | GGAGGTGGCTCGAGCGGTGGCAGCGGTGGCTCTGGTG |
| | LC | GTATTAGCAGTGGTCTGTTAAGCGGTCGTAGCGATAA |
| | nucleotide | TCATGGCGGTTCTGACATCCAGATGACCCAGAGCCCC |
| | sequence | AGCAGCCTGTCTGCTAGCGTGGGCGACAGAGTGACCA |
| | | TCACCTGTAGAGCCAGCCAGAGCATCAGCAGCTACCT |
| | | GAACTGGTATCAGCAGAAGCCCGGCAAGGCCCCCAA |
| | | ACTGCTGATCTACGCCGCCAGCTCTCTGCAGTCTGGC |
| | | GTGCCCAGCAGATTTTCCGGCAGCGGCTCTGGCACCG |
| | | ACTTCACCCTGACCATCAGCTCCCTGCAGCCCGAGGA |
| | | CTTCGCCACCTACTACTGCCAGCAGGACAACGGCTAC |
| | | CCCAGCACCTTTGGCGGAGGTACCAAGGTGGAAATCA |
| | | AGCGTTGTGAGGCCACTCACAAGACATCAACTTCACC |
| | | CATTGTCAAGAGCTTCAACAGGAATGAGTGT |
| 971 | PL07-2001 | GIALCPSHFCQLPQTGGGSSGGSGGSGGISSGLLSGRSDN |
| | LC amino | HGGSDIQMTQSPSSLSASVGDRVTITCRASQSISSYLNWY |
| | acid | QQKPGKAPKLLIYAASSLQSGVPSRFSGSGSGTDFTLTIS |
| | sequence | SLQPEDFATYYCQQDNGYPSTFGGGTKVEIKR |
| 972 | Spacer + | CAAGGTCAGTCTGGATCCGGAGGTGGCTCGAGCGGTG |
| | PL10-2001 | GCAGCGGTGGCTCTGGTGGTATTAGCAGTGGTCTGTT |
| | LC | AAGCGGTCGTAGCGATAATCATGGCGGTTCTGACATC |
| | (nucleotide | CAGATGACCCAGAGCCCCAGCAGCCTGTCTGCTAGCG |
| | sequence) | TGGGCGACAGAGTGACCATCACCTGTAGAGCCAGCCA |
| | | GAGCATCAGCAGCTACCTGAACTGGTATCAGCAGAAG |
| | | CCCGGCAAGGCCCCCAAACTGCTGATCTACGCCGCCA |
| | | GCTCTCTGCAGTCTGGCGTGCCCAGCAGATTTTCCGG |
| | | CAGCGGCTCTGGCACCGACTTCACCCTGACCATCAGC |
| | | TCCCTGCAGCCCGAGGACTTCGCCACCTACTACTGCC |
| | | AGCAGGACAACGGCTACCCCAGCACCTTTGGCGGAG |
| | | GTACCAAGGTGGAAATCAAGCGTTGTGAGGCCACTCA |
| | | CAAGACATCAACTTCACCCATTGTCAAGAGCTTCAAC |
| | | AGGAATGAGTGT |
| 973 | Spacer + | QGQSGSPCHPHPYDARPYCNVGGGSSGGSGGSGGISSGL |
| | PL10-2001 | LSGRSDNHGGSDIQMTQSPSSLSASVGDRVTITCRASQSI |
| | LC (amino | SSYLNWYQQKPGKAPKLLIYAASSLQSGVPSRFSGSGSG |
| | acid | TDFTLTISSLQPEDFATYYCQQDNGYPSTFGGGTKVEIKR |
| | sequence) | |
| 974 | PL10-2001 | GGAGGTGGCTCGAGCGGTGGCAGCGGTGGCTCTGGTG |
| | LC | GTATTAGCAGTGGTCTGTTAAGCGGTCGTAGCGATAA |
| | nucleotide | TCATGGCGGTTCTGACATCCAGATGACCCAGAGCCCC |
| | sequence | AGCAGCCTGTCTGCTAGCGTGGGCGACAGAGTGACCA |
| | | TCACCTGTAGAGCCAGCCAGAGCATCAGCAGCTACCT |
| | | GAACTGGTATCAGCAGAAGCCCGGCAAGGCCCCCAA |
| | | ACTGCTGATCTACGCCGCCAGCTCTCTGCAGTCTGGC |
| | | GTGCCCAGCAGATTTTCCGGCAGCGGCTCTGGCACCG |
| | | ACTTCACCCTGACCATCAGCTCCCTGCAGCCCGAGGA |
| | | CTTCGCCACCTACTACTGCCAGCAGGACAACGGCTAC |
| | | CCCAGCACCTTTGGCGGAGGTACCAAGGTGGAAATCA |
| | | AGCGTTGTGAGGCCACTCACAAGACATCAACTTCACC |
| | | CATTGTCAAGAGCTTCAACAGGAATGAGTGT |
| 975 | PL10-2001 | PCHPHPYDARPYCNVGGGSSGGSGGSGGISSGLLSGRSD |
| | LC amino | NHGGSDIQMTQSPSSLSASVGDRVTITCRASGSISSYLNW |
| | acid | YQQKPGKAPKLLIYAASSLQSGVPSRFSGSGSGTDFTLTI |
| | sequence | SSLQPEDFATYYCQQDNGYPSTFGGGTKVEIKR |
| 976 | Spacer + | QGQSGSPCYWHPFFAYRYCNTGGGSSGGSGGSGGISSG |
| | PL11-2001 | LLSGRSDNHGGSDIQMTQSPSSLSASVGDRVTITCRASQS |
| | LC (amino | ISSYLNWYQQKPGKAPKLLIYAASSLQSGVPSRFSGSGS |
| | acid | GTDFTLTISSLQPEDFATYYCQQDNGYPSTFGGGTKVEI |
| | sequence) | KR |
| 977 | PL11-2001 | PCYWHPFFAYRYCNTGGGSSGGSGGSGGISSGLLSGRSD |
| | LC amino | NHGGSDIQMTQSPSSLSASVGDRVTITCRASQSISSYLNW |
| | acid | YQQKPGKAPKLLIYAASSLQSGVPSRFSGSGSGTDFTLTI |
| | sequence | SSLQPEDFATYYCQQDNGYPSTFGGGTKVEIKR |
| 978 | Spacer + | QGQSGSVCYYMDWLGRNWCSSGGGSSGGSGGSGGISS |
| | PL12-2001 | GLLSGRSDNHGGSDIQMTQSPSSLSASVGDRVTITCRAS |
| | LC (amino | QSISSYLNWYQQKPGKAPKLLIYAASSLQSGVPSRFSGS |
| | acid | GSGTDFTLTISSLQPEDFATYYCQQDNGYPSTFGGGTKV |
| | sequence) | EIKR |
| 979 | PL12-2001 | VCYYMDWLGRNWCSSGGGSSGGSGGSGGISSGLLSGRS |
| | LC amino | DNHGGSDIQMTQSPSSLSASVGDRVTITCRASQSISSYLN |
| | acid | WYQQKPGKAPKLLIYAASSLQSGVPSRFSGSGSGTDFTL |
| | sequence | TISSLQPEDFATYYCQQDNGYPSTFGGGTKVEIKR |
| 980 | Spacer + | CAAGGTCAGTCTGGATCCGGAGGTGGCTCGAGCGGTG |
| | PL14-2001 | GCAGCGGTGGCTCTGGTGGTATTAGCAGTGGTCTGTT |
| | LC | AAGCGGTCGTAGCGATAATCATGGCGGTTCTGACATC |
| | (nucleotide | CAGATGACCCAGAGCCCCAGCAGCCTGTCTGCTAGCG |
| | sequence) | TGGGCGACAGAGTGACCATCACCTGTAGAGCCAGCCA |
| | | GAGCATCAGCAGCTACCTGAACTGGTATCAGCAGAAG |
| | | CCCGGCAAGGCCCCCAAACTGCTGATCTACGCCGCCA |
| | | GCTCTCTGCAGTCTGGCGTGCCCAGCAGATTTTCCGG |
| | | CAGCGGCTCTGGCACCGACTTCACCCTGACCATCAGC |
| | | TCCCTGCAGCCCGAGGACTTCGCCACCTACTACTGCC |
| | | AGCAGGACAACGGCTACCCCAGCACCTTTGGCGGAG |
| | | GTACCAAGGTGGAAATCAAGCGTTGTGAGGCCACTCA |
| | | CAAGACATCAACTTCACCCATTGTCAAGAGCTTCAAC |
| | | AGGAATGAGTGT |
| 981 | Spacer + | QGQSGSYLPCHFVPIGACNNKGGGSSGGSGGSGGISSGL |
| | PL14-2001 | LSGRSDNHGGSDIQMTQSPSSLSASVGDRVTITCRASQSI |
| | LC (amino | SSYLNWYQQKPGKAPKLLIYAASSLQSGVPSRFSGSGSG |
| | acid | TDFTLTISSLQPEDFATYYCQQDNGYPSTFGGGTKVEIKR |
| | sequence) | |
| 982 | PL14-2001 | GGAGGTGGCTCGAGCGGTGGCAGCGGTGGCTCTGGTG |
| | LC | GTATTAGCAGTGGTCTGTTAAGCGGTCGTAGCGATAA |
| | nucleotide | TCATGGCGGTTCTGACATCCAGATGACCCAGAGCCCC |
| | sequence | AGCAGCCTGTCTGCTAGCGTGGGCGACAGAGTGACCA |
| | | TCACCTGTAGAGCCAGCCAGAGCATCAGCAGCTACCT |
| | | GAACTGGTATCAGCAGAAGCCCGGCAAGGCCCCCAA |
| | | ACTGCTGATCTACGCCGCCAGCTCTCTGCAGTCTGGC |
| | | GTGCCCAGCAGATTTTCCGGCAGCGGCTCTGGCACCG |
| | | ACTTCACCCTGACCATCAGCTCCCTGCAGCCCGAGGA |
| | | CTTCGCCACCTACTACTGCCAGCAGGACAACGGCTAC |
| | | CCCAGCACCTTTGGCGGAGGTACCAAGGTGGAAATCA |
| | | AGCGTTGTGAGGCCACTCACAAGACATCAACTTCACC |
| | | CATTGTCAAGAGCTTCAACAGGAATGAGTGT |
| 983 | PL14-2001 | YLPCHFVPIGACNNKGGGSSGGSGGSGGISSGLLSGRSD |
| | LC amino | NHGGSDIQMTQSPSSLSASVGDRVTITCRASQSISSYLNW |
| | acid | YQQKPGKAPKLLIYAASSLQSGVPSRFSGSGSGTDFTLTI |
| | sequence | SSLQPEDFATYYCQQDNGYPSTFGGGTKVEIKR |
| 984 | Spacer + | CAAGGTCAGTCTGGATCCGGAGGTGGCTCGAGCGGTG |
| | PL15-2001 | GCAGCGGTGGCTCTGGTGGTATTAGCAGTGGTCTGTT |
| | LC | AAGCGGTCGTAGCGATAATCATGGCGGTTCTGACATC |
| | (nucleotide | CAGATGACCCAGAGCCCCAGCAGCCTGTCTGCTAGCG |
| | sequence) | TGGGCGACAGAGTGACCATCACCTGTAGAGCCAGCCA |
| | | GAGCATCAGCAGCTACCTGAACTGGTATCAGCAGAAG |
| | | CCCGGCAAGGCCCCCAAACTGCTGATCTACGCCGCCA |
| | | GCTCTCTGCAGTCTGGCGTGCCCAGCAGATTTTCCGG |
| | | CAGCGGCTCTGGCACCGACTTCACCCTGACCATCAGC |
| | | TCCCTGCAGCCCGAGGACTTCGCCACCTACTACTGCC |
| | | AGCAGGACAACGGCTACCCCAGCACCTTTGGCGGAG |
| | | GTACCAAGGTGGAAATCAAGCGTTGTGAGGCCACTCA |
| | | CAAGACATCAACTTCACCCATTGTCAAGAGCTTCAAC |
| | | AGGAATGAGTGT |
| 985 | Spacer + | QGQSGSIFCHMGVVVPQCANYGGGSSGGSGGSGGISSG |
| | PL15-2001 | LLSGRSDNHGGSDIQMTQSPSSLSASVGDRVTITCRASQS |
| | LC (amino | ISSYLNWYQQKPGKAPKLLIYAASSLQSGVPSRFSGSGS |
| | acid | GTDFTLTISSLQPEDFATYYCQQDNGYPSTFHGGTKVEI |
| | Sequence) | KR |
| 986 | PL15-2001 | GGAGGTGGCTCGAGCGGTGGCAGCGGTGGCTCTGGTG |
| | LC | GTATTAGCAGTGGTCTGTTAAGCGGTCGTAGCGATAA |
| | nucleotide | TCATGGCGGTTCTGACATCCAGATGACCCAGAGCCCC |
| | sequence | AGCAGCCTGTCTGCTAGCGTGGGCGACAGAGTGACCA |
| | | TCACCTGTAGAGCCAGCCAGAGCATCAGCAGCTACCT |
| | | GAACTGGTATCAGCAGAAGCCCGGCAAGGCCCCCAA |
| | | ACTGCTGATCTACGCCGCCAGCTCTCTGCAGTCTGGC |
| | | GTGCCCAGCAGATTTTCCGGCAGCGGCTCTGGCACCG |
| | | ACTTCACCCTGACCATCAGCTCCCTGCAGCCCGAGGA |
| | | CTTCGCCACCTACTACTGCCAGCAGGACAACGGCTAC |
| | | CCCAGCACCTTTGGCGGAGGTACCAAGGTGGAAATCA |
| | | AGCGTTGTGAGGCCACTCACAAGACATCAACTTCACC |
| | | CATTGTCAAGAGCTTCAACAGGAATGAGTGT |
| 987 | PL15-2001 | IFCHMGVVVPQCANYGGGSSGGSGGSGGISSGLLSGRSD |
| | LC amino | NHGGSDIQMTQSPSSLSASVGDRVTITCRASQSISSYLNW |
| | acid | YQQKPGKAPKLLIYAASSLQSGVPSRFSGSGSGTDFTLTI |
| | sequence | SSLQPEDFATYYCQQDNGYPSTFGGGTKVEIKR |
| 988 | Spacer + | CAAGGTCAGTCTGGATCCGGAGGTGGCTCGAGCGGTG |
| | PL18-2001 | GCAGCGGTGGCTCTGGTGGTATTAGCAGTGGTCTGTT |
| | LC | AAGCGGTCGTAGCGATAATCATGGCGGTTCTGACATC |
| | (nuucleotide | CAGATGACCCAGAGCCCCAGCAGCCTGTCTGCTAGCG |
| | sequence) | TGGGCGACAGAGTGACCATCACCTGTAGAGCCAGCCA |
| | | GAGCATCAGCAGCTACCTGAACTGGTATCAGCAGAAG |
| | | CCCGGCAAGGCCCCCAAACTGCTGATCTACGCCGCCA |
| | | GCTCTCTGCAGTCTGGCGTGCCCAGCAGATTTTCCGG |
| | | CAGCGGCTCTGGCACCGACTTCACCCTGACCATCAGC |
| | | TCCCTGCAGCCCGAGGACTTCGCCACCTACTACTGCC |
| | | AGCAGGACAACGGCTACCCCAGCACCTTTGGCGGAG |
| | | GTACCAAGGTGGAAATCAAGCGTTGTGAGGCCACTCA |
| | | CAAGACATCAACTTCACCCATTGTCAAGAGCTTCAAC |
| | | AGGAATGAGTGT |
| 989 | Spacer + | QGQSGSPCHPHAYDARPYCNVGGGSSGGSGGSGGISSG |
| | PL18-2001 | LLSGRSDNHGGSDIQMTQSPSSLSASVGDRVTITCRASQS |
| | LC (amino | ISSYLNWYQQKPGKAPKLLIYAASSLQSGVPSRFSGSGS |
| | acid | GTDFTLTISSLQPEDFATYYCQQDNGYPSTFGGGTKVEI |
| | sequence | KR |
| 990 | PL18-2001 | GGAGGTGGCTCGAGCGGTGGCAGCGGTGGCTCTGGTG |
| | LC | GTATTAGCAGTGGTCTGTTAAGCGGTCGTAGCGATAA |
| | nuucleotide | TCATGGCGGTTCTGACATCCAGATGACCCAGAGCCCC |
| | sequence | AGCAGCCTGTCTGCTAGCGTGGGCGACAGAGTGACCA |
| | | TCACCTGTAGAGCCAGCCAGAGCATCAGCAGCTACCT |
| | | GAACTGGTATCACTCAGAAGCCCGGCAAGGCCCCCAA |
| | | ACTGCTGATCTACGCCGCCAGCTCTCTGCAGTCTGGC |
| | | GTGCCCAGCAGATTTTCCGGCAGCGGCTCTGGCACCG |
| | | ACTTCACCCTGACCATCAGCTCCCTGCAGCCCGAGGA |
| | | CTTCGCCACCTACTACTGCCAGCAGGACAACGGCTAC |
| | | CCCAGCACCTTTGGCGGAGGTACCAAGGTGGAAATCA |
| | | AGCGTTGTGAGGCCACTCACAAGACATCAACTTCACC |
| | | CATTGTCAAGAGCTTCAACAGGAATGAGTGT |
| 991 | PL18-2001 | PCHPHAYDARPYCNVGGGSSGGSGGSGGISSGLLSGRSD |
| | LC amino | NHGGSDIQMTQSPSSLSASVGDRVTITCRASQSISSYLNW |
| | acid | YQQKPGKAPKLLIYAASSLQSGVPSRFSGSGSGTDFTLTI |
| | sequence | SSLQPEDFATYYCQQDNGYPSTFGGGTKVEIKR |
| 992 | Spacer + | QGQSGSPCHPHPADARPYCNVGGGSSGGSGGSGGISSGL |
| | PL19-2001 | LSGRSDNHGGSDIQMTQSPSSLSASVGDRVTITCRASQSI |
| | LC (amino | SSYLNWYQQKPGKAPKLLIYAASSLQSGVPSRFSGSGSG |
| | acid | TDFLTISSLQPEDFATYYCQQDNGYPSTFGGGTKVEIKR |
| | sequence) | |
| 993 | PL19-2001 | PCHPHPADARPYCNVGGGSSGGSGGSGGISSGLLSGRSD |
| | LC amino | NHGGSDIQMTQSPSSLSASVGDRVTITCRASQSISSYLNW |
| | acid | YQQKPGKAPKLLIYAASSLQSGVPSRFSGSGSGTDFTLTI |
| | sequence | SSLQPEDFATYYCQQDNGYPSTFGGGTKVEIKR |
| 994 | Spacer + | QGQSGSPCHPHPYAARPYCNVGGGSSGGSGGSGGISSGL |
| | PL20-2001 | LSGRSDNHGGSDIQMTQSPSSLSASVGDRVTITCRASQSI |
| | LC (amino | SSYLNWYQQKPGKAPKLLIYAASSLQSGVPSRFSGSGSG |
| | acid | TDFLTISSLQPEDFATYYCQQDNGYPSTFGGGTKVEIKR |
| | sequence) | |
| 995 | PL20-2001 | PCHPHPYAARPYCNVGGGSSGGSGGSGGISSGLLSGRSD |
| | LC amino | NHGGSDIQMTQSPSSLSASVGDRVTITCRASQSISSYLNW |
| | acid | YQQKPGKAPKLLIYAASSLQSGVPSRFSGSGSGTDFTLTI |
| | sequence | SSLQPEDFATYYCQQDNGYPSTFGGGTKVEIKR |
| 996 | Spacer + | CAAGGTCAGTCTGGATCCGGAGGTGGCTCGAGCGGTG |
| | PL03- | GCAGCGGTGCTGTGGGTCTCCTGGCTCCCCCGGGCGG |
| | 1004/GG/00 | CCTGTCCGGCCGCAGCGATAATCATGGCGGTTCTGAC |
| | 01 LC | ATCCAGATGACCCAGAGCCCCAGCAGCCTGTCTGCTA |
| | (nucleotide | GCGTGGGCGACAGAGTGACCATCACCTGTAGAGCCA |
| | sequence) | GCCAGAGCATCAGCAGCTACCTGAACTGGTATCAGCA |
| | | GAAGCCCGCsCAAGGCCCCCAAACTGCTGATCTACGCC |
| | | GCCAGCTCTCTGCAGTCTGGCGTGCCCAGCAGATTTT |
| | | CCGGCAGCGGCTCTGGCACCGACTTCACCCTGACCAT |
| | | CAGCTCCCTGCAGCCCGAGGACTTCGCCACCTACTAC |
| | | TGCCAGCAGGACAACGGCTACCCCAGCACCTTTGGCG |
| | | GAGGTACCAAGGTGGAAATCAAGCGTTGTGAGGCCA |
| | | CTCACAAGACATCAACTTCACCCATTGTCAAGAGCTT |
| | | CAACAGGAATGAGTGT |
| 997 | Spacer + | QGQSGSLCEVLMLLQHPWCMGGGGSSGGSGAVGLLAP |
| | PL03- | PGGLSGRSDNHGGSDIQMTQSPSSLSASVGDRVTITCRA |
| | 1004/GG/00 | SQSISSYLNWYQQKPGKAPKLLIYAASSLQSGVPSRFSGS |
| | 01 LC | GSGTDFTLTISSLQPEDFATYYCQQDNGYPSTFGGGTKV |
| | (amino acid | EIKR |
| | sequence | |
| 998 | PL03- | GGACTGTGGCTCGAGCGGTGGCAGCGGTGCTGTGGGTC |
| | 1004/GG/00 | TCCTGGCTCCCCCGGGCGGCCTGTCCGGCCGCAGCGA |
| | 01 LC | TAATCATGGCGGTTCTGACATCCAGATGACCCAGAGC |
| | nucleotide | CCCAGCAGCCTGTCTGCTAGCGTGGGCGACAGAGTGA |
| | sequence | CCATCACCTGTAGAGCCAGCCAGAGCATCAGCAGCTA |
| | | CCTGAACTGGTATCAGCAGAAGCCCGGCAAGGCCCCC |
| | | AAACTGCTGATCTACGCCGCCAGCTCTCTGCAGTCTG |
| | | GCGTGCCCAGCAGATTTTCCGGCAGCGGCTCTGGCAC |
| | | CGACTTCACCCTGACCATCAGCTCCCTGCAGCCCGAG |
| | | GACTTCGCCACCTACTACTGCCAGCAGGACAACGGCT |
| | | ACCCCAGCACCTTTGGCGGAGGTACCAAGGTGGAAAT |
| | | CAAGCGTTGTGAGGCCACTCACAAGACATCAACTTCA |
| | | CCCATTGTCAAGAGCTTCAACAGGAATGAGTGT |
| 999 | PL03- | LCEVLMLLQHPWCMGGGGSSGGSGAVGLLAPPGGLSG |
| | 1004/GG/00 | RSDNHGGSDIQMTQSPSSLSASVGDRVTITCRASQSISSY |
| | 01 LC | LNWYQQKPGKAPKLLIYAASSLQSGVPSRFSGSGSGTDF |
| | amino acid | TLTISSLQPEDFATYYCQQDNGYPSTFGGGTKVEIKR |
| | sequence | |
| 1000 | Spacer + | CAAGGTCAGTCTGGATCCGGAGGTGGCTCGAGCGGTG |
| | PL06- | GCAGCGGTGCTGTGGGTCTCCTGGCTCCCCCGGGCGG |
| | 1004/GG/00 | CCTGTCCGGCCGCAGCGATAATCATGGCGGTTCTGAC |
| | 01 LC | ATCCAGATGACCCAGAGCCCCAGCAGCCTGTCTGCTA |
| | (nucleotide | GCGTGGGCGACAGAGTGACCATCACCTGTAGAGCCA |
| | sequence) | GCCAGAGCATCAGCAGCTACCTGAACTGGTATCAGCA |
| | | GAAGCCCGGCAAGGCCCCCAAACTGCTGATCTACGCC |
| | | GCCAGCTCTCTGCAGTCTGGCGTGCCCAGCAGATTTT |
| | | CCGGCAGCGGCTCTGGCACCGACTTCACCCTGACCAT |
| | | CAGCTCCCTGCAGCCCGAGGACTTCGCCACCTACTAC |
| | | TGCCAGCAGGACAACGGCTACCCCAGCACCTTTGGCG |
| | | GAGGTACCAAGGTGGAAATCAAGCGTTGCGAAGTCA |
| | | CCCATCAGGGCCTGAGCTCGCCCGTCACAAAGAGCTT |
| | | CAACAGGGGAGAGTGT |
| 1001 | Spacer + | QGQSGSILYCDSWGAGCLTRPGGGSSGGSGAVGLLAPP |
| | PL06- | GGLSGRSDNHGGSDIQMTQSPSSLSASVGDRVTITCRAS |
| | 1004/GG/00 | QSISSYLNWYQQKPGKAPKLLIYAASSLQSGVPSRFSGS |
| | 01 LC | GSGTDFTLTISSLQPEDFATYYCQQDNGYPSTFGGGTKV |
| | (amino acid | EIKR |
| | sequence) | |
| 1002 | PL06- | GGAGGTGGCTCGAGCGGTGGCAGCGGTGCTGTGGGTC |
| | 1004/GG/00 | TCCTGCCTCCCCCGGCGGGCCTGTCCGGCCGCAGCGA |
| | 01 LC | TAATCATGGCGGTTCTGACATCCAGATGACCCAGAGC |
| | nucleotide | CCCAGCAGCCTGTCTGCTAGCGTGGGCGACAGAGTGA |
| | sequence | CCATCACCTGTAGAGCCAGCCAGAGCATCAGCAGCTA |
| | | CCTGAACTGGTATCAGCAGAAGCCCGGCAAGGCCCCC |
| | | AAACTGCTGATCTACGCCGCCAGCTCTCTGCAGTCTG |
| | | GCGTGCCCAGCAGATTTTCCGGCAGCGGCTCTGGCAC |
| | | CGACTTCACCCTGACCATCAGCTCCCTGCAGCCCGAG |
| | | GACTTCGCCACCTACTACTGCCAGCAGGACAACGGCT |
| | | ACCCCAGCACCTTTGGCGGAGGTACCAAGGTGGAAAT |
| | | CAAGCGTTGCGAAGTCACCCATCAGGGCCTGAGCTCG |
| | | CCCGTCACAAAGAGCTTCAACAGGGGAGAGTGT |
| 1003 | PL06- | ILYCDSWGAGCLTRPGGGSSGGSGAVGLLAPPGGLSGR |
| | 1004/GG/00 | SDNHGGSDIQMTQSPSSLSASVGDRVTITCRASQSISSYL |
| | 01 LC | NWYQQKPGKAPKLLIYAASSLQSGVPSRFSGSGSGTDFT |
| | amino acid | LTISSLQPEDFATYYCQQDNGYPSTFGGGTKVEIKR |
| | sequence | |
| 1004 | Spacer + | CAAGGTCAGTCTGGATCCGGAGGTGGCTCGAGCGGTG |
| | PL07- | GCAGCGGTGCTGTGGGTCTCCTGGCTCCCCCGGGCGG |
| | 1004/GG/00 | CCTGTCCGGCCGCAGCGATAATCATGGCGGTTCTGAC |
| | 01 LC | ATCCAGATGACCCAGAGCCCCAGCAGCCTGTCTGCTA |
| | (nucleotide | GCGTGGGCGACAGAGTGACCATCACCTGTAGAGCCA |
| | sequence) | GCCAGAGCATCAGCAGCTACCTGAACTGGTATCAGCA |
| | | GAAGCCCGGCAAGGCCCCCAAACTGCTGATCTACGCC |
| | | GCCAGCTCTCTGCAGTCTGGCGTGCCCAGCAGATTTT |
| | | CCGGCAGCGGCTCTGGCACCGACTTCACCCTGACCAT |
| | | CAGCTCCCTGCAGCCCGAGGACTICGCCACCTACTAC |
| | | TGCCAGCAGGACAACGGCTACCCCAGCACCTTTGGCG |
| | | GAGGTACCAAGGTGGAAATCAAGCGTTGCGAAGTCA |
| | | CCCATCAGGGCCTGAGCTCGCCCGTCACAAAGAGCTT |
| | | CAACAGGGGAGAGTGT |
| 1005 | Spacer + | QGQSGSGIALCPSHFCQLPQTGGGSSGGSGAVGLLAPPG |
| | PL07- | GLSGRSDNHGGSDIQMTQSPSSLSASVGDRVTITCRASQ |
| | 1004/GG/00 | SISSYLNWYQQKPGKAPKLLIYAASSLQSGVPSRFSGSGS |
| | 01 LC | GTDFTLTISSLQPEDFATYYCQQDNGYPSTFGGGTKVEI |
| | (amino acid | KR |
| | sequence) | |
| 1006 | PL07- | GGAGGTGGCTCGAGCGGTGGCAGCGGTGCTGTGGGTC |
| | 1004/GG/00 | TCCTGGCTCCCCCGGGCGGCCTGTCCGGCCGCAGCGA |
| | 01 LC | TAATCATGGCGGTTCTGACATCCAGATGACCCAGAGC |
| | nucleotide | CCCAGCAGCCTGTCTGCTAGCGTGGGCGACAGAGTGA |
| | sequence | CCATCACCTGTAGAGCCAGCCAGAGCATCAGCAGCTA |
| | | CCTGAACTGGTATCAGCAGAAGCCCGGCAAGGCCCCC |
| | | AAACTGCTGATCTACGCCGCCAGCTCTCTGCAGTCTG |
| | | GCGTGCCCAGCAGATTTTCCGGCAGCGGCTCTGGCAC |
| | | CGACTTCACCCTGACCATCAGCTCCCTGCAGCCCGAG |
| | | GACTTCGCCACCTACTACTGCCAGCAGGACAACGGCT |
| | | ACCCCAGCACCTTTGGCGGAGGTACCAAGGTGGAAAT |
| | | CAAGCGTTGCGAAGTCACCCATCAGGGCCTGAGCTCG |
| | | CCCGTCACAAAGAGCTTCAACAGGGGAGAGTGT |
| 1007 | PL07- | GIALCPSHFCQLPQTGGGSSGGSGAVGLLAPPGGLSGRS |
| | 1004/GG/00 | DNHGGSDIQMTQSPSSLSASVGDRVTITCRASQSISSYLN |
| | 01 LC | WYQQKPGKAPKLLIYAASSLQSGVPSRFSGSGSGTDFTL |
| | amino acid | TISSLQPEDFATYYCQQDNGYPSTFGGGTKVEIKR |
| | sequence | |
| 1008 | Spacer + | CAAGGTCAGTCTGGATCCGGAGGTGGCTCGAGCGGTG |
| | PL14- | GCAGCGGTGCTGTGGGTCTCCTGGCTCCCCCGGGCGG |
| | 1004/GG/00 | CCTGTCCGGCCGCAGCGATAATCATGGCGGTTCTGAC |
| | 01 LC | ATCCAGATGACCCAGAGCCCCAGCAGCCTGTCTGCTA |
| | (nucleotide | GCGTGGGCGACAGAGTGACCATCACCTGTAGAGCCA |
| | sequence) | GCCAGAGCATCAGCAGCTACCTGAACTGGTATCAGCA |
| | | GAAGCCCGGCAAGGCCCCCAAACTGCTGATCTACGCC |
| | | GCCAGCTCTCTGCAGTCTGGCGTGCCCAGCAGATTTT |
| | | CCGGCAGCGGCTCTGGCACCGACTTCACCCTGACCAT |
| | | CAGCTCCCTGCAGCCCGAGGACTTCGCCACCTACTAC |
| | | TGCCAGCAGGACAACGGCTACCCCAGCACCTTTGGCG |
| | | GAGGTACCAAGGTGGAAATCAAGCGTTGCGAAGTCA |
| | | CCCATCAGGGCCTGAGCTCGCCCGTCACAAAGAGCTT |
| | | CAACAGGGGAGAGTGT |
| 1009 | Spacer + | QGQSGSYLPCHFVPIGACNNKGGGSSGGSGAVGLLAPP |
| | PL 14- | GGLSGRSDNHGGSDIQMTQSPSSLSASVGDRVTTTCRAS |
| | 1004/GG/00 | QSISSYLNWYQQKPGKAPKLLIYAASSLQSGVPSRFSGS |
| | 01 LC | GSGTDFTLTISSLQPEDFATYYCQQDNGYPSTFGGGTKV |
| | (amino acid | EIKR |
| | sequence) | |
| 1010 | PL14- | GGAGGTGGCTCGAGCGGTGGCAGCGGTGCTGTGGGTC |
| | 1004/GG/00 | TCCTGGCTCCCCCGGGCGGCCTGTCCGGCCGCAGCGA |
| | 01 LC | TAATCATGGCGGTTCTGACATCCAGATGACCCAGAGC |
| | nucleotide | CCCAGCAGCCTGTCTGCTAGCGTGGGCGACAGAGTGA |
| | sequence | CCATCACCTGTAGAGCCAGCCAGAGCATCAGCAGCTA |
| | | CCTGAACTGGTATCAGCAGAAGCCCGGCAAGGCCCCC |
| | | AAACTGCTGATCTACGCCGCCAGCTCTCTGCAGTCTG |
| | | GCGTGCCCAGCAGATTTTCCGGCAGCGGCTCTGGCAC |
| | | CGACTTCACCCTGACCATCAGCTCCCTGCAGCCCGAG |
| | | GACTTCGCCACCTACTACTGCCAGCAGGACAACGGCT |
| | | ACCCCAGCACCTTTGGCGGAGGTACCAAGGTGGAAAT |
| | | CAAGCGTTGCGAAGTCACCCATCAGGGCCTGAGCTCG |
| | | CCCGTCACAAAGAGCTTCAACAGGGGAGAGTGT |
| 1011 | PL14- | YLPCHFVPIGACNNKGGGSSGGSGAVGLLAPPGGLSGRS |
| | 1004/GG/00 | DNHGGSDIQMTQSPSSLSASVGDRVTITCRASQSISSYLN |
| | 01 LC | WYQQKPGKAPKLLIYAASSLQSGVPSRFSGSGSGTDFTL |
| | amino acid | TISSLQPEDFATYYCQQDNGYPSTFGGGTKVEIKR |
| | sequence | |
| 1012 | Spacer + | CAAGGTCAGTCTGGATCCGGAGGTGGCTCGAGCGGTG |
| | PL15- | GCAGCGGTGCTGTGGGTCTCCTGGCTCCCCCGGGCGG |
| | 1004/GG/00 | CCTGTCCGGCCGCAGCGATAATCATGGCGGTTCTGAC |
| | 01 LC | ATCCAGATGACCCAGAGCCCCAGCAGCCTGTCTGCTA |
| | (nucleotide | GCGTGGGCGACAGAGTGACCATCACCTGTAGAGCCA |
| | sequence) | GCCAGAGCATCAGCAGCTACCTGAACTGGTATCAGCA |
| | | GAAGCCCGGCAAGGCCCCCAAACTGCTGATCTACGCC |
| | | GCCAGCTCTCTGCAGTCTGGCGTGCCCAGCAGATTTT |
| | | CCGGCAGCGGCTCTGGCACCGACTTCACCCTGACCAT |
| | | CAGCTCCCTGCAGCCCGAGGACTTCGCCACCTACTAC |
| | | TGCCAGCAGGACAACGGCTACCCCAGCACCTTTGGCG |
| | | GAGGTACCAAGGTGGAAATCAAGCGTTGTGAGGCCA |
| | | CTCACAAGACATCAACTTCACCCATTGTCAAGAGCTT |
| | | CAACAGGAATGAGTGT |
| 1013 | Spacer + | QGQSGSIFCHMGVVVPQCANYGGGSSGGSGAVGLLAPP |
| | PL15- | GGLSGRSDNHGGSDIQMTQSPSSLSASVGDRVTITCRAS |
| | 1004/GG/00 | QSISSYLNWYQQKPGKAPKLLIYAASSLQSGVPSRFSGS |
| | 01 LC | GSGTDFTLTISSLQPEDFATYYCQQDNGYPSTFGGGTKV |
| | (amino acid | EIKR |
| | sequence) | |
| 1014 | PL15- | GGAGGTGGCTCGAGCGGTGGCAGCGGTGCTGTGGGTC |
| | 1004/GG/00 | TCCTGGCTCCCCCGGGCGGCCTGTCCGGCCGCAGCGA |
| | 01 LC | TAATCATGGCGGTTCTGACATCCAGATGACCCAGAGC |
| | nucleotide | CCCAGCAGCCTGTCTGCTAGCGTGGGCGACAGAGTGA |
| | sequence | CCATCACCTGTAGAGCCAGCCAGAGCATCAGCAGCTA |
| | | CCTGAACTGGTATCAGCAGAAGCCCGGCAAGGCCCCC |
| | | AAACTGCTGATCTACGCCGCCAGCTCTCTGCAGTCTG |
| | | GCGTGCCCAGCAGATTTTCCGGCAGCGGCTCTGGCAC |
| | | CGACTTCACCCTGACCATCAGCTCCCTGCAGCCCGAG |
| | | GACTTCGCCACCTACTACTGCCAGCAGGACAACGGCT |
| | | ACCCCAGCACCTTTGGCGGAGGTACCAAGGTGGAAAT |
| | | CAAGCGTTGTGAGGCCACTCACAAGACATCAACCTCA |
| | | CCCATTGTCAAGAGCTTCAACAGGAATGAGTGT |
| 1015 | PLl5- | IFCHMGVVVPQCANYGGGSSGGSGAVGLLAPPGGLSGR |
| | 1004/GG/00 | SDNHGGSDIQMTQSPSSLSASVGDRVTITCRASQSISSYL |
| | 01 LC | NWYQQKPGKAPKLLIYAASSLQSGVPSRFSGSGSGTDFT |
| | amino acid | LTISSLQPEDFATYYCQQDNGYPSTFGGGTKVEIKR |
| | sequence | |
| 1016 | Spacer + | CAAGGTCAGTCTGGATCCGGAGGTGGCTCGAGCGGTG |
| | PL18- | GCAGCGGTGCTGTGGGTCTCCTGGCTCCCCCGGGCGG |
| | 1004/GG/00 | CCTGTCCGGCCGCAGCGATAATCATGGCGGTTCTGAC |
| | 01 LC | ATCCAGATGACCCAGAGCCCCAGCAGCCTGTCTGCTA |
| | (nucleotide | GCGTGGGCGACAGAGTGACCATCACCTGTAGAGCCA |
| | sequence) | GCCAGAGCATCAGCAGCTACCTGAACTGGTATCAGCA |
| | | GAAGCCCGGCAAGGCCCCCAAACTGCTGATCTACGCC |
| | | GCCAGCTCTCTGCAGTCTGGCGTGCCCAGCAGATTTT |
| | | CCGGCAGCGGCTCTGGCACCGACTTCACCCTGACCAT |
| | | CAGCTCCCTGCAGCCCGAGGACTTCGCCACCTACTAC |
| | | TGCCAGCAGGACAACGGCTACCCCAGCACCTTTGGCG |
| | | GAGGTACCAAGGTGGAAATCAAGCGTTGTGAGGCCA |
| | | CTCACAAGACATCAACTTCACCCATTGTCAAGAGCTT |
| | | CAACAGGAATGAGTGT |
| 1017 | Spacer + | QGQSGSPCHPHAYDARPYCNVGGGSSGGSGAVGLLAPP |
| | PL18- | GGLSGRSDNHGGSDIQMTQSPSSLSASVGDRVTITCRAS |
| | 1004/GG/00 | QSISSYLNWYQQKPGKAPKLLIYAASSLQSGVPSRFSGS |
| | 01 LC | GSGTDFTLTISSLQPEDFATYYCQQDNGYPSTFGGGTKV |
| | (amino acid | EIKR |
| | sequence) | |
| 1018 | PL18- | GGAGGTGGCTCGAGCGGTGGCAGCGGTGCTGTGGGTC |
| | 1004/GG/00 | TCCTGGCTCCCCCGGGCGGCCTGTCCGGCCGCAGCGA |
| | 01 LC | TAATCATGGCGGTTCTGACATCCAGATGACCCAGAGC |
| | nucleotide | CCCAGCAGCCTGTCTGCTAGCGTGGGCGACAGAGTGA |
| | sequence | CCATCACCTGTAGAGCCAGCCAGAGCATCAGCAGCTA |
| | | CCTGAACTGGTATCAGCAGAAGCCCGGCAAGGCCCCC |
| | | AAACTGCTGATCTACGCCGCCAGCTCTCTGCAGTCTG |
| | | GCGTGCCCAGCAGATTTTCCGGCAGCGGCTCTGGCAC |
| | | CGACTTCACCCTGACCATCAGCTCCCTGCAGCCCGAG |
| | | GACTTCGCCACCTACTACTGCCAGCAGGACAACGGCT |
| | | ACCCCAGCACCTTTGGCGGAGGTACCAAGGTGGAAAT |
| | | CAAGCGTTGTGAGGCCACTCACAAGACATCAACTTCA |
| | | CCCATTGTCAAGAGCTTCAACAGGAATGAGTGT |
| 1019 | PL18- | PCHPHAYDARPYCNVGGGSSGGSGAVGLLAPPGGLSGR |
| | 1004/GG/00 | SDNHGGSDIQMTQSPSSLSASVGDRVTITCRASQSISSYL |
| | 01 LC | NWYQQKPGKAPKLLIYAASSLQSGVPSRFSGSGSGTDFT |
| | amino acid | LTISSLQPEDFATYYCQQDNGYPSTFGGGTKVEIKR |
| | sequence | |
| 1020 | Spacer + | QGQSGSGIALCPSHFCQLPQTGGGSSGGSGGSGGLSGRS |
| | PL07-0001 | DNHGGSDIQMTQSPSSLSASVGDRVTITCRASQSISSYLN |
| | LC (amino | WYQQKPGKAPKLLIYAASSLQSGVPSRFSGSGSGTDFTL |
| | acid | TISSLQPEDFATYYCQQDNGYPSTFGGGTKVEIKR |
| | sequence) | |
| 1021 | PL07-0001 | GIALCPSHFCQLPQTGGGSSGGSGGSGGLSGRSDNHGGS |
| | LC amino | DIQMTQSPSSLSASVGDRVTITCRASQSISSYLNWYQQKP |
| | acid | GKAPKLLIYAASSLQSGVPSRFSGSGSGTDFTLTISSLQPE |
| | sequence | DFATYYCQIQDNGYPSTFGGGTKVEIKR |
| 1022 | Spacer + | QGQSGSGIALCPSHFCQLPQTGGGSSGGSGGSGGLSGRS |
| | PL07-0002 | DNHGGSDIQMTQSPSSLSASVGDRVTITCRASQSISSYLN |
| | LC (amino | WYQQKPGKAPKLLIYAASSLQSGVPSRFSGSGSGTDFTL |
| | acid | TISSLQPEDFATYYCQQDNGYPSTFGGGTKVEIKR |
| | sequence) | |
| 1023 | PL07-0002 | GIALCPSHFCQLPQTGGGSSGGSGGSGGLSGRSDNHGGS |
| | LC amino | DIQMTQSPSSLSASVGDRVTITCRASQSISSYLNWYQQKP |
| | acid | GKAPKLLIYAASSLQSGVPSRFSGSGSGTDFTLTISSLQPE |
| | sequence | DFATYYCQIQDNGYPSTFGGGTKVEIKR |
| 1024 | Spacer + | QGQSGSGIALCPSHFCQLPQTGGGSSGGSGGSGGISSGLL |
| | PL07-001 | SSGGSDIQMTQSPSSLSASVGDRVTITCRASQSISSYLNW |
| | LC (amino | YQQKPGKAPKLLIYAASSLQSGVPSRFSGSGSGTDFTLTI |
| | acid | SSLQPEDFATYYCQQDNGYPSTFGGGTKVEIKR |
| | sequence) | |
| 1025 | PL07-1001 | GIALCPSHFCQLPQTGGGSSGGSGGSGGISSGLLSSGGSD |
| | LC amino | IQMTQSPSSLSASVGDRVTITCRASQSISSYLNWYQQKPG |
| | acid | KAPKLLIYAASSLQSGVPSRFSGSGSGTDFTLTISSLQPED |
| | sequence | FATYYCQQDNGYPSTFGGGTKVEIKR |
| 1026 | Spacer + | QGQSGSGIALCPSHFCQLPQTGGGSSGGSGGSGGQNQAL |
| | PL07-1002 | RMAGGSDIQMTQSPSSLSASVGDRVTITCRASQSISSYLN |
| | LC (amino | WYQQKPGKAPKLLIYAASSLQSGVPSRFSGSGSGTDFTL |
| | acid | TISSLQPEDFATYYCQQDNGYPSTFGGGTKVEIKR |
| | sequence) | |
| 1027 | PL07-1002 | GIALCPSHFCQLPQTGGGSSGGSGGSGGQNQALRMAGG |
| | LC amino | SDIQMTQSPSSLSASVGDRVTITCRASQSISSYLNWYQQK |
| | acid | PGKAPKLLIYAASSLQSGVPSRFSGSGSGTDFTLTISSLQP |
| | sequence | EDFATYYCQQDNGYPSTFGGGTKVEIKR |
| 1028 | Spacer + | QGQSGSGIALCPSHFCQLPQTGGGSSGGSGGSGGVHMPL |
| | PL07-1003 | GFLGPGGSDIQMTQSPSSLSASVGDRVTITCRASQSISSY |
| | LC (amino | LNWYQQKPGKAPKLLIYAASSLQSGVPSRFSGSGSGTDF |
| | acid | TLTISSLQPEDFATYYCQQDNGYPSTFGGGTKVEIKR |
| | sequence) | |
| 1029 | PL07-003 | GIALCPSHFCQLPQTGGGSSGGSGGSGGVHMPLGFLGPG |
| | LC amino | GSDIQMTQSPSSLSASVGDRVTITCRASQSISSYLNWYQQ |
| | acid | KPGKAPKLLIYAASSLQSGVPSRFSGSGSGTDFTLTISSLQ |
| | sequence | PEDFATYYCQQDNGYPSTFGGGTKVEIKR |
| 1030 | Spacer + | QGQSGSGIALCPSHFCQLPQTGGGSSGGSGGSGGAVGLL |
| | PL07-1004 | APPGGSDIQMTQSPSSLSASVGDRVTITCRASQSISSYLN |
| | LC (amino | WYQQKPGKAPKLLIYAASSLQSGVPSRFSGSGSGTDFTL |
| | acid | TISSLQPEDFATYYCQQDNGYPSTFGGGTKVEIKR |
| | sequence) | |
| 1031 | PL07-1004 | GIALCPSHFCQLPQTGGGSSGGSGGSGGAVGLLAPPGGS |
| | LC amino | DIQMTQSPSSLSASVGDRVTITCRASQSISSYLNWYQQKP |
| | acid | GKAPKLLIYAASSLQSGVPSRFSGSGSGTDFTLTISSLQPE |
| | sequence | DFATYYCQQDNGYPSTFGGGTKVEIKR |
| 1032 | Spacer + | QGQSGSGIALCPSHFCQLPTGGGSSGGSGGSGGISSGLL |
| | PL07-2002 | SGRSGNHGGSDIQMTQSPSSLSASVGDRVTITCRASQSIS |
| | LC (amino | SYLNWYQQKPGKAPKLLIYAASSLQSGVPSRFSGSGSGT |
| | acid | DFTLTISSLQPEDFATYYCQQDNGYPSTFGGGTKVEIKR |
| | sequence) | |
| 1033 | PL07-2002 | GIALCPSHFCQLPQTGGGSSGGSGGSGGISSGLLSGRSGN |
| | LC amino | HGGSDIQMTQSPSSLSASVGDRVTITCRASQSISSYLNWY |
| | acid | QQKPGKAPKLLIYAASSLQSGVPSRFSGSGSGTDFTLTIS |
| | sequence | SLQPEDFATYYCQQDNGYPSTFGGGTKVEIKR |
| 1034 | Spacer + | QGQSGSGIALCPSHFCQLPQTGGGSSGGSGGSGGISSGLL |
| | PL07-2003 | SGRSANPRGGGSDIQMTQSPSSLSASVGDRVTITCRASQS |
| | LC (amino | ISSYLNWYQQKPGKAPKLLIYAASSLQSGVPSRFSGSGS |
| | acid | GTDFTLTISSLQPEDFATYYCQQDNGYPSTFGGGTKVEI |
| | sequence) | KR |
| 1035 | PL07-2003 | GIALCPSHFCQLPQTGGGSSGGSGGSGGISSGLLSGRSAN |
| | LC amino | PRGGGSDIQMTQSPSSLSASVGDRVTITCRASQSISSYLN |
| | acid | WYQQKPGKAPKLLIYAASSLQSGVPSRFSGSGSGTDFTL |
| | sequence | TISSLQPEDFATYYCQQDNGYPSTFGGGTKVEIKR |
| 1036 | Spacer + | QGQSGSGIALCPSHFCQLPQTGGGSSGGSGGSGGAVGLL |
| | PL07-2004 | APPTSGRSANPRGGGSDIQMTQSPSSLSASVGDRVTITCR |
| | LC (amino | ASQSISSYLNWYQQKPGKAPKLLIYAASSLQSGVPSRFS |
| | acid | GSGSGTDFTLTISSLQPEDFATYYCQQDNGYPSTFGGGT |
| | sequence) | KVEIKR |
| 1037 | PL07-2004 | GIALCPSHFCQLPQTGGGSSGGSGGSGGAVGLLAPPTSG |
| | LC amino | RSANPRGGGSDIQMTQSPSSLSASVGDRVTITCRASQSIS |
| | acid | SYLNWYQQKPGKAPKLLIYAASSLQSGVPSRFSGSGSGT |
| | sequence | DFTLTISSLQPEDFATYYCQQDNGYPSTFGGGTKVEIKR |
| 1038 | Spacer + | QGQSGSGIALCPSHFCQLPQTGGGSSGGSGGSGGAVGLL |
| | PL07-2005 | APPSGRSANPRGGGSDIQMTQSPSSLSASVGDRVTITCRA |
| | LC (amino | SQSISSYLNWYQQKPGKAPKLLIYAASSLQSGVPSRFSGS |
| | acid | GSGTDFTLTISSLQPEDFATYYCQQDNGYPSTFGGGTKV |
| | sequence) | EIKR |
| 1039 | PL07-2005 | GIALCPSHFCQLPQTGGGSSGGSGGSGGAVGLLAPPSGR |
| | LC amino | SANPRGGGSDIQMTQSPSSLSASVGDRVTITCRASQSISS |
| | acid | YLNWYQQKPGKAPKLLIYAASSLQSGVPSRFSGSGSGTD |
| | sequence | FTLTISSLQPEDFATYYCQQDNGYPSTFGGGTKVEIKR |
| 1040 | Spacer + | QGQSGSGIALCPSHFCQLPQTGGGSSGGSGGSGGISSGLL |
| | PL07-2006 | SGRSDDHGGSDIQMTQSPSSLSASVGDRVTITCRASQSIS |
| | LC (amino | SYLNWYQQKPGKAPKLLIYAASSLQSGVPSRFSGSGSGT |
| | acid | DFTLTISSLQPEDFATYYCQQDNGYPSTFGGGTKVEIKR |
| | sequence) | |
| 1041 | PL07-2006 | GIALCPSHFCQLPQTGGGSSGGSGGSGGISSGLLSGRSDD |
| | LC amino | HGGSDIQMTQSPSSLSASVGDRVTITCRASQSISSYLNWY |
| | acid | QQKPGKAPKLLIYAASSLQSGVPSRFSGSGSGTDFTLTIS |
| | sequence | SLQPEDFATYYCQQDNGYPSTFGGGTKVEIKR |
| 1042 | Spacer + | QGQSGSGIALCPSHFCQLPQTGGGSSGGSGGSGGISSGLL |
| | PL07-2007 | SGRSDIHGGSDIQMTQSPSSLSASVGDRVTITCRASQSISS |
| | LC (amino | YLNWYQQKPGKAPKLLIYAASSLQSGVPSRFSGSGSGTD |
| | acid | FTLTISSLQPEDFATYYCQQDNGYPSTFGGGTKVEIKR |
| | sequence) | |
| 1043 | PL07-2007 | GIALCPSHFCQLPQTGGGSSGGSGGSGGISSGLLSGRSDI |
| | LC amino | HGGSDIQMTQSPSSLSASVGDRVTITCRASQSISSYLNWY |
| | acid | QQKPGKAPKLLIYAASSLQSGVPSRFSGSGSGTDFTLTIS |
| | sequence | SLQPEDFATYYCQQDNGYPSTFGGGTKVEIKR |
| 1044 | Spacer + | QGQSGSGIALCPSHFCQLPQTGGGSSGGSGGSGGISSGLL |
| | PL07-2008 | SGRSDQHGGSDIQMTQSPSSLSASVGDRVTITCRASQSIS |
| | LC (amino | SYLNWYQQKPGKAPKLLIYAASSLQSGVPSRFSGSGSGT |
| | acid | DFTLTISSLQPEDFATYYCQQDNGYPSTFGGGTKVEIKR |
| | sequence) | |
| 1045 | PL07-2008 | GIALCPSHFCQLPQTGGGSSGGSGGSGGISSGLLSGRSDQ |
| | LC amino | HGGSDIQMTQSPSSLSASVGDRVTITCRASQSISSYLNWY |
| | acid | QQKPGKAPKLLIYAASSLQSGVPSRFSGSGSGTDFTLTIS |
| | sequence | SLQPEDFATYYCQQDNGYPSTFGGGTKVEIKR |
| 1046 | Spacer + | QGQSGSGIALCPSHFCQLPQTGGGSSGGSGGSGGISSGLL |
| | PL07-2009 | SGRSDTHGGSDIQMTQSPSSLSASVGDRVTITCRASQSIS |
| | LC (amino | SYLNWYQQKPGKAPKLLIYAASSLQSGVPSRFSGSGSGT |
| | acid | DFTLTISSLQPEDFATYYCQQDNGYPSTFGGGTKVEIKR |
| | sequence) | |
| 1047 | PL07-2009 | GIALCPSHFCQLPQTGGGSSGGSGGSGGISSGLLSGRSDT |
| | LC amino | HGGSDIQMTQSPSSLSASVGDRVTITCRASQSISSYLNWY |
| | acid | QQKPGKAPKLLIYAASSLQSGVPSRFSGSGSGTDFTLTIS |
| | sequence | SLQPEDFATYYCQQDNGYPSTFGGGTKVEIKR |
| 1048 | Spacer + | QGQSGSGIALCPSHFCQLPQTGGGSSGGSGGSGGISSGLL |
| | PL07-2010 | SGRSDYHGGSDIQMTQSPSSLSASVGDRVTITCRASQSIS |
| | LC (amino | SYLNWYQQKPGKAPKLLIYAASSLQSGVPSRFSGSGSGT |
| | acid | DFTLTISSLQPEDFATYYCQQDNGYPSTFGGGTKVEIKR |
| | sequence) | |
| 1049 | PL07-2010 | GIALCPSHFCQLPQTGGGSSGGSGGSGGISSGLLSGRSDY |
| | LC amino | HGGSDIQMTQSPSSLSASVGDRVTITCRASQSISSYLNWY |
| | acid | QQKPGKAPKLLIYAASSLQSGVPSRFSGSGSGTDFTLTIS |
| | sequence | SLQPEDFATYYCQQDNGYPSTFGGGTKVEIKR |
| 1050 | Spacer + | QGQSGSGIALCPSHFCQLPQTGGGSSGGSGGSGGISSGLL |
| | PL07-2011 | SGRSDNPGGSDIQMTQSPSSLSASVGDRVTITCRASQSIS |
| | LC (amino | SYLNWYQQKPGKAPKLLIYAASSLQSGVPSRFSGSGSGT |
| | acid | DFTLTISSLQPEDFATYYCQQDNGYPSTFGGGTKVEIKR |
| | sequence) | |
| 1051 | PL07-2011 | GIALCPSHFCQLPQTGGGSSGGSGGSGGISSGLLSGRSDN |
| | LC amino | PGGSDIQMTQSPSSLSASVGDRVTITCRASQSISSYLNWY |
| | acid | QQKPGKAPKLLIYAASSLQSGVPSRFSGSGSGTDFTLTIS |
| | sequence | SLQPEDFATYYCQQDNGYPSTFGGGTKVEIKR |
| 1052 | Spacer + | QGQSGSGIALCPSHFCQLPQTGGGSSGGSGGSGGISSGLL |
| | PL07-2012 | SGRSDNPGGSDIQMTQSPSSLSASVGDRVTITCRASQSIS |
| | LC (amino | SYLNWYQQKPGKAPKLLIYAASSLQSGVPSRFSGSGSGT |
| | acid | DFTLTISSLQPEDFATYYCQQDNGYPSTFGGGTKVEIKR |
| | sequence) | |
| 1053 | PL07-2012 | GIALCPSHFCQLPQTGGGSSGGSGGSGGISSGLLSGRSAN |
| | LC amino | PGGSDIQMTQSPSSLSASVGDRVTITCRASQSISSYLNWY |
| | acid | QQKPGKAPKLLIYAASSLQSGVPSRFSGSGSGTDFTLTIS |
| | sequence | SLQPEDFATYYCQQDNGYPSTFGGGTKVEIKR |
| 1054 | Spacer + | QGQSGSGIALCPSHFCQLPQTGGGSSGGSGGSGGISSGLL |
| | PL07-2013 | SGRSANIGGSDIQMTQSPSSLSASVGDRVTITCRASQSISS |
| | LC (amino | YLNWYQQKPGKAPKLLIYAASSLQSGVPSRFSGSGSGTD |
| | acid | FTLTISSLQPEDFATYYCQQDNGYPSTFGGGTKVEIKR |
| | sequence) | |
| 1055 | PL07-2013 | GIALCPSHFCQLPQTGGGSSGGSGGSGGISSGLLSGRSAN |
| | LC amino | IGGSDIQMTQSPSSLSASVGDRVTITCRASQSISSYLNWY |
| | acid | QQKPGKAPKLLIYAASSLQSGVPSRFSGSGSGTDFTLTIS |
| | sequence | SLQPEDFATYYCQQDNGYPSTFGGGTKVEIKR |
| 1056 | Spacer + | QGQSGSGIALCPSHFCQLPQTGGGSSGGSGGSGGISSGLL |
| | PL07-2014 | SGRSDNIGGSDIQMTQSPSSLSASVGDRVTITCRASQSISS |
| | LC (amino | YLNWYQQKPGKAPKLLIYAASSLQSGVPSRFSGSGSGTD |
| | acid | FTLTISSLQPEDFATYYCQQDNGYPSTFGGGTKVEIKR |
| | sequence) | |
| 1057 | PL07-2014 | GIALCPSHFCQLPQTGGGSSGGSGGSGGISSGLLSGRSDN |
| | LC amino | IGGSDIQMTQSPSSLSASVGDRVTITCRASQSISSYLNWY |
| | acid | QQKPGKAPKLLIYAASSLQSGVPSRFSGSGSGTDFTLTIS |
| | sequence | SLQPEDFATYYCQQDNGYPSTFGGGTKVEIKR |
| 1058 | Spacer + | QGQSGSGIALCPSHFCQLPQTGGGSSGGSGGSGGAVGLL |
| | PL07- | APPGGTSTSGRSANPRGGGSDIQMTQSPSSLSASVGDRV |
| | 03 LC | TITCRASQSISSYLNWYQQKPGKAPKLLIYAASSLQSGVP |
| | (amino acid | SRFSGSGSGTDFTLTISSLQPEDFATYYCQQDNGYPSTFG |
| | sequence) | GGTKVEIKR |
| 1059 | PL07- | GIALCPSHFCQLPQTGGGSSGGSGGSGGAVGLLAPPGGT |
| | 100/GG/00 | STSGRSANPRGGGSDIQMTQSPSSLSASVGDRVTITCRAS |
| | 03 LC | QSISSYLNWYQQKPGKAPKLLIYAASSLQSGVPSRFSGS |
| | amino acid | GSGTDFTLTISSLQPEDFATYYCQQDNGYPSTFGGGTKV |
| | sequence | EIKR |
| 1060 | anti--PDL1 | GAGGTGCAGCTGTTGGAGTCTGGGGGAGGCTTGGTAC |
| | ScFvs | AGCCTGGGGGGTCCCTGAGACTCTCCTGTGCAGCCTC |
| | (nucleic acid | TGGATTCACCTTTAGCAGCTATGCCATGAGCTGGGTC |
| | sequence) | CGCCAGGCTCCAGGGAAGGGCTCTGGAGTGGGTCTCA |
| | | GATATTACTGCGTCGGGTTAGAGGACAACGTACGCAG |
| | | ACTCCGTGAAGGGCCGGTTCACCATCTCCAGAGACAA |
| | | TTCCAAGAACACGCTGTATCTGCAAATGAACAGCCTG |
| | | AGAGCCGAGGACACGGCCGTATATTACTGTGCGAGAT |
| | | CGAAGATTGCTTTTGACTACTGGGGCCAGGGAACCCT |
| | | GGTCACCGTCTCGAGCGGTGGAGGCGGTTCAGGCGGA |
| | | GGTGGCAGCGGCGGTGGCGGGTCGACGGACATCCAG |
| | | ATGACCCAGTCTCCATCCTCCCTGTCTGCATCTGTAGG |
| | | AGACAGAGTCACCATCACTTGCCGGGCAAGTCAGAGC |
| | | ATTAGCAGCTATTTAAATTGGTATCAGCAGAAACCAG |
| | | GGAAAGCCCCTAAGCTCCTGATCTATAAGGCATCCCG |
| | | TTTGCAAAGTGGGGTCCCATCAAGGTTCAGTGGCAGT |
| | | GGATCTGGGACAGATTTCACTCTCACCATCAGCAGTC |
| | | TGCAACCTGAAGATTTTGCAACTTACTACTGTCAACA |
| | | GCGTGCGCTTAAGCCTGTGACGTTCGGCCAAGGGACC |
| | | AAGGTGGAAATCAAACGG |
| 1061 | anti-PDL1 | EVQLLESGGGLVQPGGSLRLSCAASGFTFSSYAMSWVR |
| | ScFvs | QAPGKGLEWVSDITASGQRTTYADSVKGRFTISRDNSK |
| | (amino acid | NTLYLQMNSLRAEDTAVYYCARSKIAFDYWGQGTLVT |
| | sequence) | VSSGGGGSGGGGSGGGGSTDIQMTQSPSSLSASVGDRV |
| | | TITCRASQSISSYLNWYQQKPGRAPKLLIYKASRLQSGV |
| | | PSRFSGSGSGTDFTLTISSLQPEDFATYYCQQRALKPVTF |
| | | GQGTKVEIKR |
| 1062 | anti-PDL1 | GAGGTGCAGCTGTTGGAGTCTGGGGGAGGCTTGGTAC |
| | ScFvs | AGCCTGGGGGGTCCCTGAGACTATCCTGTGCAGCCTC |
| | (nucleic acid | TGGATTCACCTTTAGCAGCTATGCCATGAGCTGGGTC |
| | sequence) | CGCCAGGCTCCAGGGAAGGGGCTGGAGTGGGTCTCA |
| | | AGTATTAATAAGGATGGTCATTATACAAGTTACGCAG |
| | | ACTCCGTGAAGGGCCGGTTCACCATCTCCAGAGACAA |
| | | TTCCAAGAACACGCTGTATCTGCAAATGAACAGCCTG |
| | | AGAGCCGAGGACACGGCCGTATATTACTGTGCGAAA |
| | | AATCTTGATGAGTTTGACTACTGGGGCCAGGGAACCC |
| | | TGGTCACCGTCTCGAGCGGTGGAGGCGGTTCAGGCGG |
| | | AGGTGGCAGCGGCGGTGGCGGGTCGACGGACATCCA |
| | | GATGACCCAGTCTCCATCCTCCCTGTCTGCATCTGTAG |
| | | GAGACAGAGTCACCATCACTTGCCGGGCAAGTCAGA |
| | | GCATTAGCAGCTATTTAAATTGGTATCAGCAGAAACC |
| | | AGGGAAAGCCCCTAAGCTCCTGATCTATGCTGCATCC |
| | | AGTTTGCAAAGTGGGGTCCCATCAAGGTTCAGTGGCA |
| | | GTGGATCTGGGACAGATTTCACTCTCACCATCAGCAG |
| | | TCTGCAACCTGAAGATTTTGCAACTTACTACTGTCAAC |
| | | AGAGTTACAGTACCCCTAATACGTTCGGCCAAGGGAC |
| | | CAAGGTGGAAATCAAACGG |
| 1063 | anti-PDL1 | EVQLLESGGGLVQPGGSLRLSCAASGFTFSSYAMSWVR |
| | ScFvs | QAPGKGLEWVSSINKDGHYTSYADSVKGRFTISRDNSK |
| | (amino acid | NTLYLQMNSLRAEDTAVYYCAKNLDEFDYWGQGTLVT |
| | sequence) | VSSGGGGSGGGGSGGGGSTDIQMTQSPSSLSASVGDRV |
| | | TITCRASQSISSYLNWYQQKPGKAPKLLIYAASSLQSGVP |
| | | SRFSGSGSGTDFTLTISSLQPEDFATYYCQQSYSTPNTFG |
| | | QGTKVEIKR |
| 1064 | anti-PDL1 | GAGGTGCAGCTGTTGGAGTCTGGGGGAGGCTTGGTAC |
| | ScFvs | AGCCTGGGGGGTCCCTGAGACTCTCCTGTGCAGCCTC |
| | (nucleic acid | TGGATTCACCTTTAGCAGCTATGCCATGAGCTGGGTC |
| | sequence) | CGCCAGGCTCCAGGGAAGGGGCTGGAGTGGGTCTCAT |
| | | CTATTATGGCTACTGGTGCTGGTACATTGTACGCAGA |
| | | CTCCGTGAAGGGCCGGTTCACCATCTCCAGAGACAAT |
| | | TCCAAGAACACGCTGTATCTGCAAATGAACAGCCTGA |
| | | GAGCCGAGGACACGGCCGTATATTACTGTGCGAAAG |
| | | ATGGTGCGGGGTTTGACTACTGGGGCCAGGGAACCCT |
| | | GGTCACCGTCTCGAGCGGTGGAGGCGGTTCAGGCGGA |
| | | GGTGGCAGCGGCGGTGGCGGGTCGACGGACATCCAG |
| | | ATGACCCAGTCTCCATCCTCCCTGTCTGCATCTGTAGG |
| | | AGACAGAGTCACCATCACTTGCCGGGCAAGTCAGAGC |
| | | ATTAGCAGCTATTTAAATTGGTATCAGCAGAAACCAG |
| | | GGAAAGCCCCTAAGCTCCTGATCTATTCTGCATCCCA |
| | | GTTGCAAAGTGGGGTCCCATCAAGGTTCAGTGGCAGT |
| | | GGATCTGGGACAGATTTCACTCTCACCATCAGCAGTC |
| | | TGCAACCTGAAGATTTTGCAACTTACTACTGTCAACA |
| | | GGCGAATTCGCGGCCTTCTACGTTCGGCCAAGGGACC |
| | | AAGGTGGAAATCAAACGG |
| 1065 | anti-PDL1 | EVQLLESGGGLVQPGGSLRLSCAASGFTFSSYAMSWVR |
| | ScFvs | QAPGKGLEWVSSIMATGAGTLYADSVKGRFTISRDNSK |
| | (amino acid | NTLYLQMNSLRAEDTAVYYCAKDGAGFDYWGQGTLV |
| | sequence) | TVSSGGGGSGGGGSGGGGSTDIQMTQSPSSLSASVGDR |
| | | VTITCRASQSISSYLNWYQQKPGKAPKLLIYSASQLQSG |
| | | VPSRFSGSGSGTDFTLTISSLQPEDFATYYCQQANSRPST |
| | | FGQGTKVEIKR |
| 1066 | anti-PDL1 | GAGGTGCAGCTGTTGGAGTCTGGGGGAGGCTTGGTAC |
| | ScFvs | AGCCTGGGGGGTCCCTGAGACTCTCCTGTGCAGCCTC |
| | (nucleic acid | TGGATTCACCTTTAGCAGCTATGCCATGAGCTGGGTC |
| | sequence) | CGCCAGGCTCCAGGGAAGGGGCTGTAGTGGGTCTCAA |
| | | CTATTACTTCTTCTGGTGCTGCTACATATTACGCAGAC |
| | | TCCGTGAAGGGCCGGTTCACCATCTCCAGAGACAATT |
| | | CCAAGAACACGCTGTATCTGCAAATGAACAGCCTGAG |
| | | AGCCGAGGACACGGCCGTATATTACTGTGCGAAAAAT |
| | | TATACTGGTTTTGACTACTGGGGCCAGGGAACCCTGG |
| | | TCACCGTCTCGAGCGGTGGAGGCGGTTCAGGCGGAGG |
| | | TGGCAGCGGCGGTGGCGGGTCGACGGACATCCAGAT |
| | | GACCCAGTCTCCATCCTCCCTGTCTGCATCTGTAGGAG |
| | | ACAGAGTCACCATCACTTGCCGGGCAAGTCAGAGCAT |
| | | TAGCAGCTATTTAAATTGGTATCAGCAGAAACCAGGG |
| | | AAAGCCCCTAAGCTCCTGATCTATAATGCATCCTCCTT |
| | | GCAAAGTGGGGTCCCATCAAGGTTCAGTGGCAGTGGA |
| | | TCTGGGACAGATTTCACTCTCACCATCAGCAGTCTGC |
| | | AACCTGAAGATTTTGCAACTTACTACTGTCAACAGTA |
| | | TACTTATGGTCCTGGTACGTTCGGCCAAGGGACCAAG |
| | | GTGGAAATCAAACGG |
| 1067 | anti-PDL1 | EVQLLESGGGLVQPGGSLRLSCAASGFTFSSYAMSWVR |
| | ScFvs | QAPGKGLQWVSTITSSGAATYYADSVKGRFTISRDNSK |
| | (amino acid | NTLYLQMNSLRAEDTAVYYCAKNYTGFDYWGQGTLVT |
| | sequence) | VSSGGGGSGGGGSGGGGSTDIQMTQSPSSLSASVGDRV |
| | | TITCRASQSISSYLNWYQQKPGKAPKLLIYNASSLQSGVP |
| | | SRFSGSGSGTDFTLTISSLQPEDFATYYCQQYTYGPGTFG |
| | | QGTKVEIKR |
| 1068 | anti-PDL1 | GAGGTGCAGCTGTTGGAGTCTGGGGGAGGCTTGGTAC |
| | ScFvs | AGCCTGGGGGGTCCCTGAGACTCTCCTGTGCAGCCTC |
| | (nucleic acid | TGGATTCACCTTTAGCAGCTATGCCATGAGCTGGGTC |
| | sequence) | CGCCAGGCTCCAGGGAAGGGGCTGGAGTGGGTCTCA |
| | | AGTATTTATTCTACTGGTGGTGCTACAGCTTACGCAGA |
| | | CTCCGTGAAGGGCCGGTTCACCATCTCCAGAGACAAT |
| | | TCCAAGAACACGCTGTATCTGCAAATGAACAGCCTGA |
| | | GAGCCGAGGACACGGCCGTATATTACTGTGCGAAATC |
| | | TTCTGCTGGTTTTGACTACTGGGGCCAGGGAACCCTG |
| | | GTCACCGTCTCGAGCGGTGGAGGCGGTTCAGGCGGAG |
| | | GTGGCAGCGGCGGTGGCGGGTCGACGGACATCCAGA |
| | | TGACCCAGTCTCCATCCTCCCTGTCTGCATCTGTAGGA |
| | | GACAGAGTCACCATCACTTGCCGGGCAAGTCAGAGCA |
| | | TTAGCAGCTATTTAAATTGGTATCAGCAGAAACCAGG |
| | | GAAAGCCCCTAAGCTCCTGATCTATTATGCATCCACTT |
| | | TGCAAAGTGGGGTCCCATCAAGGTTCAGTGGCAGTGG |
| | | ATCTGGGACAGATTTCACTCTCACCATCAGCAGTCTG |
| | | CAACCTGAAGATTTTGCAACTTACTACTGTCAACAGG |
| | | ATAATGGTTATCCTTCTACGTTCGGCCAAGGGACCAA |
| | | GGTGGAAATCAAACGG |
| 1069 | anti-PDL1 | EVQLLESGGGLVQPGGSLRLSCAASGFTFSSYAMSWVR |
| | ScFvs | QAPGKGLEWVSSIYSTGGATAYADSVKGRFTISRDNSK |
| | (amino acid | NTLYLQMNSLRAEDTAVYYCAKSSAGFDYWGQGTLVT |
| | sequence) | VSSGGGGSGGGGSGGGGSTDIQMTQSPSSLSASVGDRV |
| | | TITCRASQSISSYLNWYQQKPGKAPKLLIYYASTLQSGVP |
| | | SRFSGSGSGTDFTLTISSLQPEDFATYYCQQDNGYPSTFG |
| | | QGTKVEIKR |
| 1070 | anti-PDL1 | GAAGTGCAGCTGCTCGAAAGCGGCGGAGGCTTGGTG |
| | heavy chain | CAGCCAGGAGGGAGCCTGCGACTGTCTTGCGCAGCCA |
| | (nucleic acid | GCGGATTCACTTTCTCTTCCTATGCCATGAGCTGGGTT |
| | sequence) | CGACAGGCACCCGGCAAAGGTCTCGAGTGGGTGTCTA |
| | | GCATCTGGCGAAACGGAATAGTTACAGTGTATGCCGA |
| | | TAGCGTGAAGGGTCGCTTTACTATTTCACGGGATAAT |
| | | TCTAAGAACACCCTCTACCTGCAAATGAATAGCCTTA |
| | | GGGCAGAAGATACCGCCGTGTACTACTGTGCCAAATG |
| | | GTCCGCAGCCTTTGACTACTGGGGCCAGGGGACACTG |
| | | GTGACCGTGTCCTCTGCATCAACCAAGGGGCCATCAG |
| | | TGTTCCCACTCGCCCCATCTTCCAAGAGTACTTCCGGC |
| | | GGAACCGCAGCCCTTGGCTGCCTTGTTAAGGACTATT |
| | | TCCCAGAACCCGTGACCGTAAGTTGGAACTCTGGCGC |
| | | CCTTACTTCTGGGGTGCACACCTTCCCAGCAGTGTTGC |
| | | AGTCCAGTGGCCTTTACTCTCTGTCTAGTGTAGTGACT |
| | | GTGCCTTCCTCTAGTCTCGGTACCCAGACCTATATTTG |
| | | TAATGTTAACCATAAGCCCAGCAATACAAAGGTTGAT |
| | | AAGAAAGTGGAACCCAAGAGCTGCGATAAGACACAT |
| | | ACCTGCCCACCTTGTCCAGCTCCCGAGCTGCTGGGCG |
| | | GACCCTCAGTCTTTCTCTTCCCACCTAAACCCAAGGAT |
| | | ACCCTTATGATCTCCAGGACTCCTGAGGTGACCTGCG |
| | | TTGTGGTCGACGTGTCACATGAGGACCCTGAGGTAAA |
| | | GTTTAACTGGTACGTGGACGGTGTGGAGGTACATAAC |
| | | GCTAAGACTAAGCCACGAGAGGAGCAATACGCTTCC |
| | | ACTTACAGGGTGGTCAGCGTCCTGACCGTTCTCCATC |
| | | AGGACTGGCTGAACGGGAAGGAATATAAGTGTAAGG |
| | | TTAGCAACAAAGCTCTCCCTGCACCAATCGAGAAGAC |
| | | AATCAGCAAGGCAAAAGGGCAGCCTCGGGAACCTCA |
| | | GGTCTACACCCTCCCTCCTAGCAGGGAAGAGATGACA |
| | | AAGAACCAGGTCTCTCTCACCTGCCTGGTGAAAGGCT |
| | | TCTATCCATCTGACATTGCTGTGGAGTGGGAATCCAA |
| | | CGGCCAGCCTGAAAATAATTATAAGACCACACCCCCC |
| | | GTCCTTGATTCCGATGGATCTTTCTTCCTGTACAGTAA |
| | | ACTCACCGTCGACAAATCACGGTGGCAGCAAGGTAAC |
| | | GTGTTCAGCTGTTCTGTCATGCATGAGGCTCTGCATAA |
| | | CCATTACACACAAAAGTCTTTGTCATTGTCTCCAGGAT |
| | | GATGAGAATTCATTGATCATAATCAGCCATACCAC |
| 1071 | anti-PDL1 | EVQLLESGGGLVQPGGSLRLSCAASGFTFSSYAMSWVR |
| | heavy chain | QAPGKGLEWVSSIWRNGIVTVYADSVKGRFTISRDNSK |
| | (amino acid | NTLYLQMNSLRAEDTAVYYCAKWSAAFDYWGQGTLV |
| | sequence) | TVSSASTKGPSVFPLAPSSKSTSGGTAALGCLVKDYFPEP |
| | | VTVSWNSGALTSGVHTFPAVLQSSGLYSLSSVVTVPSSS |
| | | LGTQTYICNVNHKPSNTKVDKKVEPKSCDKTHTCPPCP |
| | | APELLGGPSVFLFPPKPKDTLMISRTPEVTCVVVDVSHE |
| | | DPEVKFNWYVDGVEVHNAKTKPREEQYNSTYRVVSVL |
| | | TVLHQDWLNGKEYKCKVSNKALPAPIEKTISKAKGQPR |
| | | EPQVYTLPPSREEMTKNQVSLTCLVKGFYPSDIAVEWES |
| | | NGQPENNYKTTPPVLDSDGSFFLYSKLTVDKSRWQQGN |
| | | VFSCSVMHEALHNHYTQKSLSLSPG |
| 1072 | anti-PDL1 | GAAGTGCAGCTGCTCGAAAGCGGCGGAGGCTTGGTG |
| | heavy chain | CAGCCAGGAGGGAGCCTGCGACTGTCTTGCGCAGCCA |
| | (nucleic acid | GCGGATTCACTTTCTCTTCCTATGCCATGAGCTGGGTT |
| | sequence) | CGACAGGCACCCGGCAAAGGTCTCGAGTGGGTGTCTA |
| | | GCATCTGGCGAAACGGAATAGTTACAGTGTATGCCGA |
| | | TAGCGTGAAGGGTCGCTTTACTATTTCACGGGATAAT |
| | | TCTAAGAACACCCTCTACCTGCAAATGAATAGCCTTA |
| | | GGGCAGAAGATACCGCCGTGTACTACTGTGCCAAATG |
| | | GTCCGCAGCCTTTGACTACTGGGGCCAGGGGACACTG |
| | | GTGACCGTGTCCTCTGCATCAACCAAGGGGCCATCAG |
| | | TGTTCCCACTCGCCCCATCTTCCAAGAGTACTTCCGGC |
| | | GGAACCGCAGCCCTTGGCTGCCTTGTTAAGGACTATT |
| | | TCCCAGAACCCGTGACCGTAAGTTGGAACTCTGGCGC |
| | | CCTTACTTCTGGGGTGCACACCTTCCCAGCAGTGTTGC |
| | | AGTCCAGTGGCCTTTACTCTCTGTCTAGTGTAGTGACT |
| | | GTGCCTTCCTCTAGTCTCGGTACCCAGACCTATATTTG |
| | | TAATGTTAACCATAAGCCCAGCAATACAAAGGTTGAT |
| | | AAGAAAGTGGAACCCAAGAGCTGCGATAAGACACAT |
| | | ACCTGCCCACCTTGTCCAGCTCCCGAGCTGCTGGGCG |
| | | GACCCTCAGTCTTTCTCTTCCCACCTAAACCCAAGGAT |
| | | ACCCTTATGATCTCCAGGACTCCTGAGGTGACCTGCG |
| | | TTGTGGTCGACGTGTCACATGAGGACCCTGAGGTAAA |
| | | GTTTAACTGGTACGTGGACGGTGTGGAGGTACATAAC |
| | | GCTAAGACTAAGCCACGAGAGGAGCAATACGCTTCC |
| | | ACTTACAGGGTGGTCAGCGTCCTGACCGTTCTCCATC |
| | | AGGACTGGCTGAACGGGAAGGAATATAAGTGTAAGG |
| | | TTAGCAACAAAGCTCTCCCTGCACCAATCGAGAAGAC |
| | | AATCAGCAAGGCAAAAGGGCAGCCTCGGGAACCTCA |
| | | GGTCTACACCCTCCCTCCTAGCAGGGAAGAGATGACA |
| | | AAGAACCAGGTCTCTCTCACCTGCCTGGTGAAAGGCT |
| | | TCTATCCATCTGACATTGCTGTGGAGTGGGAATCCAA |
| | | CGGCCAGCCTGAAAATAATTATAAGACCACACCCCCC |
| | | GTCCTTGATTCCGATGGATCTTTCTTCCTGTACAGTAA |
| | | ACTCACCGTCGACAAATCACGGTGGCAGCAAGGTAAC |
| | | GTGTTCAGCTGTTCTGTCATGCATGAGGCTCTGCATAA |
| | | CCATTACACACAAAAGTCTTTGTCATTGTCTCCAGGAT |
| | | GATGAGAATTCATTGATCATAATCAGCCATACCAC |
| 1073 | anti-PDL1 | EVQLLESGGGLVQPGGSLRLSCAASGFTFSSYAMSWVR |
| | heavy chain | QAPGKGLEWVSSIWRNGIVTVYADSVKGRFTISRDNSK |
| | (amino acid | NTLYLQMNSLRAEDTAVYYCAKWSAAFDYWGQGTLV |
| | sequence) | TVSSASTKGPSVFPLAPSSKSTSGGTAALGCLVKDYFPEP |
| | | VTVSWNSGALTSGVHTFPAVLQSSGLYSLSSVVTVPSSS |
| | | LGTQTYICNVNHKPSNTKVDKKVEPKSCDKTHTCPPCP |
| | | APELLGGPSVFLFPPKPKDTLMISRTPEVTCVVVDVSHE |
| | | DPEVKFNWYVDGVEVHNAKTKPREEQYASTYRVVSVL |
| | | TVLHQDWLNGKEYKCKVSNKALPAPIEKTISKAKGQPR |
| | | EPQVYTLPPSREEMTKNQVSLTCLVKGFYPSDIAVEWES |
| | | NGQPENNYKTTPPVLDSDGSFFLYSKLTVDKSRWQQGN |
| | | VFSCSVMHEALHNHYTQKSLSLSPG |
| 1074 | anti-PDL1 | EVQLLESGGGLVQPGGSLRLSCAASGFTFSSYAMSWVR |
| | heavy chain | QAPGKGLEWVSSIWRNGIVTVYADSVKGRFTISRDNSK |
| | (amino acid | NTLYLQMNSLRAEDTAVYYCAKWSAAFDYWGQGTLV |
| | sequence) | TVSSASTKGPSVFPLAPSSKSTSGGTAALGCLVKDYFPEP |
| | | VTVSWNSGALTSGVHTFPAVLQSSGLYSLSSVVTVPSSS |
| | | LGTQTYICNVNHKPSNTKVDKKVEPKSCDKTHTCPPCP |
| | | APELLGGPSVFLFPPKPKDTLMISRTPEVTCVVVDVSHE |
| | | DPEVKFNWYVDGVEVHNAKTKPREEQYNSTYRVVSVL |
| | | TVLHQDWLNGKEYKCKVSNKALPAPIEKTISKAKGQPR |
| | | EPQVYTLPPSREEMTKNQVSLTCLVKGFYPSDIAVEWES |
| | | NGQPENNYKTTPPVLDSDGSFFLYSKLTVDKSRWQQGN |
| | | VFSCSVMHEALHNHYTQKSLSLSPG |
| 1075 | CDR1, VL | QSMSSY |
| 1076 | CDR1, VH | GITVGTNY |
| 1077 | CDR2, VH | ISSGGNT |

[0212] While the foregoing invention has been described in some detail for purposes of clarity and understanding, it will be clear to one skilled in the art from a reading of this disclosure that various changes in form and detail can be made without departing from the true scope of the invention. It is understood that the materials, examples, and embodiments described herein are for illustrative purposes only and not intended to be limiting and that various modifications or changes in light thereof will be suggested to persons skilled in the art and are to be included within the spirit and scope of the appended claims.

The application's sequence listing, which the Patent Office published only in electronic form, follows.

SEQUENCE LISTING (1077 sequences)

SEQ ID NO: 1 - protein, 8 aa, Artificial Sequence
  Synthetic
LSGRSDNH

SEQ ID NO: 2 - protein, 8 aa, Artificial Sequence
  Synthetic
TGRGPSWV

SEQ ID NO: 3 - protein, 8 aa, Artificial Sequence
  Synthetic
PLTGRSGG

SEQ ID NO: 4 - protein, 8 aa, Artificial Sequence
  Synthetic
TARGPSFK

SEQ ID NO: 5 - protein, 12 aa, Artificial Sequence
  Synthetic
NTLSGRSENHSG

SEQ ID NO: 6 - protein, 12 aa, Artificial Sequence
  Synthetic
NTLSGRSGNHGS

SEQ ID NO: 7 - protein, 12 aa, Artificial Sequence
  Synthetic
TSTSGRSANPRG

SEQ ID NO: 8 - protein, 8 aa, Artificial Sequence
  Synthetic
TSGRSANP

SEQ ID NO: 9 - protein, 10 aa, Artificial Sequence
  Synthetic
VHMPLGFLGP

SEQ ID NO: 10 - protein, 8 aa, Artificial Sequence
  Synthetic
AVGLLAPP

SEQ ID NO: 11 - protein, 8 aa, Artificial Sequence
  Synthetic
AQNLLGMV

SEQ ID NO: 12 - protein, 8 aa, Artificial Sequence
  Synthetic
QNQALRMA

SEQ ID NO: 13 - protein, 8 aa, Artificial Sequence
  Synthetic
LAAPLGLL

SEQ ID NO: 14 - protein, 8 aa, Artificial Sequence
  Synthetic
STFPFGMF

SEQ ID NO: 15 - protein, 8 aa, Artificial Sequence
  Synthetic
ISSGLLSS

SEQ ID NO: 16 - protein, 8 aa, Artificial Sequence
  Synthetic
PAGLWLDP

SEQ ID NO: 17 - protein, 8 aa, Artificial Sequence
  Synthetic
VAGRSMRP

SEQ ID NO: 18 - protein, 8 aa, Artificial Sequence
  Synthetic
VVPEGRRS

SEQ ID NO: 19 - protein, 8 aa, Artificial Sequence
  Synthetic
ILPRSPAF

SEQ ID NO: 20 - protein, 8 aa, Artificial Sequence
  Synthetic
MVLGRSLL

SEQ ID NO: 21 - protein, 8 aa, Artificial Sequence
  Synthetic
QGRAITFI

SEQ ID NO: 22 - protein, 8 aa, Artificial Sequence
  Synthetic
SPRSIMLA

SEQ ID NO: 23 - protein, 8 aa, Artificial Sequence
  Synthetic
SMLRSMPL

SEQ ID NO: 24 - protein, 13 aa, Artificial Sequence
  Synthetic
ISSGLLSGRSDNH

SEQ ID NO: 25 - protein, 18 aa, Artificial Sequence
  Synthetic
AVGLLAPPGGLSGRSDNH

SEQ ID NO: 26 - protein, 22 aa, Artificial Sequence
  Synthetic
ISSGLLSSGGSGGSLSGRSDNH

SEQ ID NO: 27 - protein, 8 aa, Artificial Sequence
  Synthetic
LSGRSGNH

SEQ ID NO: 28 - protein, 9 aa, Artificial Sequence
  Synthetic
SGRSANPRG

SEQ ID NO: 29 - protein, 8 aa, Artificial Sequence
  Synthetic
LSGRSDDH

SEQ ID NO: 30 - protein, 8 aa, Artificial Sequence
  Synthetic
LSGRSDIH

SEQ ID NO: 31 - protein, 8 aa, Artificial Sequence
  Synthetic
LSGRSDQH

SEQ ID NO: 32 - protein, 8 aa, Artificial Sequence
  Synthetic
LSGRSDTH

SEQ ID NO: 33 - protein, 8 aa, Artificial Sequence
  Synthetic
LSGRSDYH

SEQ ID NO: 34 - protein, 8 aa, Artificial Sequence
  Synthetic
LSGRSDNP

SEQ ID NO: 35 - protein, 8 aa, Artificial Sequence
  Synthetic
LSGRSANP

SEQ ID NO: 36 - protein, 8 aa, Artificial Sequence
  Synthetic
LSGRSANI

SEQ ID NO: 37 - protein, 8 aa, Artificial Sequence
  Synthetic
LSGRSDNI

SEQ ID NO: 38 - protein, 8 aa, Artificial Sequence
  Synthetic
MIAPVAYR

SEQ ID NO: 39 - protein, 8 aa, Artificial Sequence
  Synthetic
RPSPMWAY

SEQ ID NO: 40 - protein, 8 aa, Artificial Sequence
  Synthetic
WATPRPMR

SEQ ID NO: 41 - protein, 8 aa, Artificial Sequence
  Synthetic
FRLLDWQW

SEQ ID NO: 42 - protein, 5 aa, Artificial Sequence
  Synthetic
ISSGL

SEQ ID NO: 43 - protein, 7 aa, Artificial Sequence
  Synthetic
ISSGLLS

SEQ ID NO: 44 - protein, 6 aa, Artificial Sequence
  Synthetic
ISSGLL

SEQ ID NO: 45 - protein, 15 aa, Artificial Sequence
  Synthetic
ISSGLLSGRSANPRG

SEQ ID NO: 46 - protein, 18 aa, Artificial Sequence
  Synthetic
AVGLLAPPTSGRSANPRG

SEQ ID NO: 47 - protein, 17 aa, Artificial Sequence
  Synthetic
AVGLLAPPSGRSANPRG

SEQ ID NO: 48 - protein, 13 aa, Artificial Sequence
  Synthetic
ISSGLLSGRSDDH

SEQ ID NO: 49 - protein, 13 aa, Artificial Sequence
  Synthetic
ISSGLLSGRSDIH

SEQ ID NO: 50 - protein, 13 aa, Artificial Sequence
  Synthetic
ISSGLLSGRSDQH

SEQ ID NO: 51 - protein, 13 aa, Artificial Sequence
  Synthetic
ISSGLLSGRSDTH

SEQ ID NO: 52 - protein, 13 aa, Artificial Sequence
  Synthetic
ISSGLLSGRSDYH

SEQ ID NO: 53 - protein, 13 aa, Artificial Sequence
  Synthetic
ISSGLLSGRSDNP

SEQ ID NO: 54 - protein, 13 aa, Artificial Sequence
  Synthetic
ISSGLLSGRSANP

SEQ ID NO: 55 - protein, 13 aa, Artificial Sequence
  Synthetic
ISSGLLSGRSANI

SEQ ID NO: 56 - protein, 18 aa, Artificial Sequence
  Synthetic
AVGLLAPPGGLSGRSDDH

SEQ ID NO: 57 - protein, 18 aa, Artificial Sequence
  Synthetic
AVGLLAPPGGLSGRSDIH

SEQ ID NO: 58 - protein, 18 aa, Artificial Sequence
  Synthetic
AVGLLAPPGGLSGRSDQH

SEQ ID NO: 59 - protein, 18 aa, Artificial Sequence
  Synthetic
AVGLLAPPGGLSGRSDTH

SEQ ID NO: 60 - protein, 18 aa, Artificial Sequence
  Synthetic
AVGLLAPPGGLSGRSDYH

SEQ ID NO: 61 - protein, 18 aa, Artificial Sequence
  Synthetic
AVGLLAPPGGLSGRSDNP

SEQ ID NO: 62 - protein, 18 aa, Artificial Sequence
  Synthetic
AVGLLAPPGGLSGRSANP

SEQ ID NO: 63 - protein, 18 aa, Artificial Sequence
  Synthetic
AVGLLAPPGGLSGRSANI

SEQ ID NO: 64 - protein, 13 aa, Artificial Sequence
  Synthetic
ISSGLLSGRSDNI

SEQ ID NO: 65 - protein, 18 aa, Artificial Sequence
  Synthetic
AVGLLAPPGGLSGRSDNI

SEQ ID NO: 66 - protein, 19 aa, Artificial Sequence
  Synthetic
GLSGRSDNHGGAVGLLAPP

SEQ ID NO: 67 - protein, 21 aa, Artificial Sequence
  Synthetic
GLSGRSDNHGGVHMPLGFLGP

SEQ ID NO: 68 - protein, 5 aa, Artificial Sequence
  Synthetic
GSGGS

SEQ ID NO: 69 - protein, 4 aa, Artificial Sequence
  Synthetic
GGGS

SEQ ID NO: 70 - protein, 4 aa, Artificial Sequence
  Synthetic
GGSG

SEQ ID NO: 71 - protein, 5 aa, Artificial Sequence
  Synthetic
GGSGG

SEQ ID NO: 72 - protein, 5 aa, Artificial Sequence
  Synthetic
GSGSG

SEQ ID NO: 73 - protein, 5 aa, Artificial Sequence
  Synthetic
GSGGG

SEQ ID NO: 74 - protein, 5 aa, Artificial Sequence
  Synthetic
GGGSG

SEQ ID NO: 75 - protein, 5 aa, Artificial Sequence
  Synthetic
GSSSG

SEQ ID NO: 76 - protein, 13 aa, Artificial Sequence
  Synthetic
GSSGGSGGSGGSG

SEQ ID NO: 77 - protein, 11 aa, Artificial Sequence
  Synthetic
GSSGGSGGSGG

SEQ ID NO: 78 - protein, 12 aa, Artificial Sequence
  Synthetic
GSSGGSGGSGGS

SEQ ID NO: 79 - protein, 16 aa, Artificial Sequence
  Synthetic
GSSGGSGGSGGSGGGS

SEQ ID NO: 80 - protein, 10 aa, Artificial Sequence
  Synthetic
GSSGGSGGSG

SEQ ID NO: 81 - protein, 11 aa, Artificial Sequence
  Synthetic
GSSGGSGGSGS

SEQ ID NO: 82 - protein, 5 aa, Artificial Sequence
  Synthetic
GSSGT

SEQ ID NO: 83 - protein, 4 aa, Artificial Sequence
  Synthetic
GSSG

SEQ ID NO: 84 - protein, 15 aa, Artificial Sequence
  Synthetic
YCEVSELFVLPWCMG

SEQ ID NO: 85 - protein, 15 aa, Artificial Sequence
  Synthetic
SCLMHPHYAHDYCYV

SEQ ID NO: 86 - protein, 15 aa, Artificial Sequence
  Synthetic
LCEVLMLLQHPWCMG

SEQ ID NO: 87 - protein, 15 aa, Artificial Sequence
  Synthetic
IACRHFMEQLPFCHH

SEQ ID NO: 88 - protein, 15 aa, Artificial Sequence
  Synthetic
FGPRCGEASTCVPYE

SEQ ID NO: 89 - protein, 15 aa, Artificial Sequence
  Synthetic
ILYCDSWGAGCLTRP

SEQ ID NO: 90 - protein, 15 aa, Artificial Sequence
  Synthetic
GIALCPSHFCQLPQT

SEQ ID NO: 91 - protein, 15 aa, Artificial Sequence
  Synthetic
DGPRCFVSGECSPIG

SEQ ID NO: 92 - protein, 15 aa, Artificial Sequence
  Synthetic
LCYKLDYDDRSYCHI

SEQ ID NO: 93 - protein, 15 aa, Artificial Sequence
  Synthetic
PCHPHPYDARPYCNV

SEQ ID NO: 94 - protein, 15 aa, Artificial Sequence
  Synthetic
PCYWHPFFAYRYCNT

SEQ ID NO: 95 - protein, 15 aa, Artificial Sequence
  Synthetic
VCYYMDWLGRNWCSS

SEQ ID NO: 96 - protein, 15 aa, Artificial Sequence
  Synthetic
LCDLFKLREFPYCMG

SEQ ID NO: 97 - protein, 15 aa, Artificial Sequence
  Synthetic
YLPCHFVPIGACNNK

SEQ ID NO: 98 - protein, 15 aa, Artificial Sequence
  Synthetic
IFCHMGVVVPQCANY

SEQ ID NO: 99 - protein, 15 aa, Artificial Sequence
  Synthetic
ACHPHPYDARPYCNV

SEQ ID NO: 100 - protein, 15 aa, Artificial Sequence
  Synthetic
PCHPAPYDARPYCNV

SEQ ID NO: 101 - protein, 15 aa, Artificial Sequence
  Synthetic
PCHPHAYDARPYCNV

SEQ ID NO: 102 - protein, 15 aa, Artificial Sequence
  Synthetic
PCHPHPADARPYCNV

SEQ ID NO: 103 - protein, 15 aa, Artificial Sequence
  Synthetic
PCHPHPYAARPYCNV

SEQ ID NO: 104 - protein, 15 aa, Artificial Sequence
  Synthetic
PCHPHPYDAAPYCNV

SEQ ID NO: 105 - protein, 15 aa, Artificial Sequence
  Synthetic
PCHPHPYDARPACNV

SEQ ID NO: 106 - protein, 15 aa, Artificial Sequence
  Synthetic
PCHPHPYDARPYCAV

SEQ ID NO: 107 - protein, 15 aa, Artificial Sequence
  Synthetic
PCHAHPYDARPYCNV

SEQ ID NO: 108 - protein, 15 aa, Artificial Sequence
  Synthetic
PCHPHPYDARAYCNV

SEQ ID NO: 109 - DNA, 324 bp, Artificial Sequence
  Synthetic
gacatccagatgacccagtctccatcctccctgtctgcatctgtaggagacagagtcaccatcacttgccgggcaagtcagagcattagcagctatttaaattggtatcagcagaaaccagggaaagcccctaagctcctgatctattatgcatccactttgcaaagtggggtcccatcaaggttcagtggcagtggatctgggacagatttcactctcaccatcagcagtctgcaacctgaagattttgcaacttactactgtcaacaggataatggttatccttctacgttcggccaagggaccaaggtggaaatcaaacgg

SEQ ID NO: 110 - protein, 108 aa, Artificial Sequence
  Synthetic
DIQMTQSPSSLSASVGDRVTITCRASQSISSYLNWYQQKPGKAPKLLIYYASTLQSGVPSRFSGSGSGTDFTLTISSLQPEDFATYYCQQDNGYPSTFGQGTKVEIKR

SEQ ID NO: 111 - DNA, 324 bp, Artificial Sequence
  Synthetic
gatattcagatgacccagagcccgagcagcctgagcgcgagcgtgggcgatcgcgtgaccattacctgccgcgcgagccagagcattagcagctatctgaactggtatcagcagaaaccgggcaaagcgccgaaactgctgatttatgcggcgagcagcctgcagagcggcgtgccgagccgctttagcggcagcggcagcggcaccgattttaccctgaccattagcagcctgcagccggaagattttgcgacctattattgccagcaggataacggctatccgagcacctttggcggcggcaccaaagtggaaattaaacgc

SEQ ID NO: 112 - protein, 108 aa, Artificial Sequence
  Synthetic
DIQMTQSPSSLSASVGDRVTITCRASQSISSYLNWYQQKPGKAPKLLIYAASSLQSGVPSRFSGSGSGTDFTLTISSLQPEDFATYYCQQDNGYPSTFGGGTKVEIKR

SEQ ID NO: 113 - DNA, 360 bp, Artificial Sequence
  Synthetic
gaggtgcagctgttggagtctgggggaggcttggtacagcctggggggtccctgagactctcctgtgcagcctctggattcacctttagcagctatgccatgagctgggtccgccaggctccagggaaggggctggagtgggtctcaagtatttattctactggtggtgctacagcttacgcagactccgtgaagggccggttcaccatctccagagacaattccaagaacacgctgtatctgcaaatgaacagcctgagagccgaggacacggccgtatattactgtgcgaaatcttctgctggtagtcggccgggttttgactactggggccagggaaccctggtcaccgtctcgagc

SEQ ID NO: 114 - protein, 121 aa, Artificial Sequence
  Synthetic
EVQLLESGGGLVQPGGSLRLSCAASGFTFSSYAMSWVRQAPGKGLEWVSSIYSTGGATAYADSVKGRFTISRDNSKNTLYLQMNSLRAEDTAVYYCAKSSAGQSRPGFDYWGQGTLVTVSS

SEQ ID NO: 115 - DNA, 360 bp, Artificial Sequence
  Synthetic
gaggtgcagctgttggagtctgggggaggcttggtacagcctggggggtccctgagactctcctgtgcagcctctggattcacctttagcagctatgccatgagctgggtccgccaggctccagggaaggggctggagtgggtctcaagtatttattctactggtggtgctacagcttacgcagactccgtgaagggccggttcaccatctccagagacaattccaagaacacgctgtatctgcaaatgaacagcctgagagccgaggacacggccgtatattactgtgcgaaatcttctgctggttcgtggccgggttttgactactggggccagggaaccctggtcaccgtctcgagc

SEQ ID NO: 116 - protein, 121 aa, Artificial Sequence
  Synthetic
EVQLLESGGGLVQPGGSLRLSCAASGFTFSSYAMSWVRQAPGKGLEWVSSIYSTGGATAYADSVKGRFTISRDNSKNTLYLQMNSLRAEDTAVYYCAKSSAGQSWPGFDYWGQGTLVTVSS

SEQ ID NO: 117 - DNA, 363 bp, Artificial Sequence
  Synthetic
gaggtgcagctgttggagtctgggggaggcttggtacagcctggggggtccctgagactctcctgtgcagcctctggattcacctttagcagctatgccatgagctgggtccgccaggctccagggaaggggctggagtgggtctcaagtatttattctactggtggtgctacagcttacgcagactccgtgaagggccggttcaccatctccagagacaattccaagaacacgctgtatctgcaaatgaacagcctgagagccgaggacacggccgtatattactgtgcgaaatcttctgctggtcagtcgtttccgggttttgactactggggccagggaaccctggtcaccgtctcgagc

SEQ ID NO: 118 - protein, 121 aa, Artificial Sequence
  Synthetic
EVQLLESGGGLVQPGGSLRLSCAASGFTFSSYAMSWVRQAPGKGLEWVSSIYSTGGATAYADSVKGRFTISRDNSKNTLYLQMNSLRAEDTAVYYCAKSSAGQSFPGFDYWGQGTLVTVSS

SEQ ID NO: 119 - DNA, 348 bp, Artificial Sequence
  Synthetic
gaggtgcagctgttggagtctgggggaggcttggtacagcctggggggtccctgagactctcctgtgcagcctctggattcacctttagcagctatgccatgagctgggtccgccaggctccagggaaggggctggagtgggtctcaagtatttattctactggtggtgctacagcttacgcagactccgtgaagggccggttcaccatctccagagacaattccaagaacacgctgtatctgcaaatgaacagcctgagagccgaggacacggccgtatattactgtgcgaaatggtctgctgcttttgactactggggccagggaaccctggtcaccgtctcgagc

SEQ ID NO: 120 - protein, 116 aa, Artificial Sequence
  Synthetic
EVQLLESGGGLVQPGGSLRLSCAASGFTFSSYAMSWVRQAPGKGLEWVSSIYSTGGATAYADSVKGRFTISRDNSKNTLYLQMNSLRAEDTAVYYCAKWSAAFDYWGQGTLVTVSS

SEQ ID NO: 121 - DNA, 348 bp, Artificial Sequence; identical to SEQ ID NO: 119
  Synthetic

SEQ ID NO: 122 - protein, 116 aa, Artificial Sequence
  Synthetic
EVQLLESGGGLVQPGGSLRLSCAASGFTFSSYAMSWVRQAPGKGLEWVSSIYSTGGATAYADSVKGRFTISRDNSKNTLYLQMNSLRAEDTAVYYCAKWSAGYDYWGQGTLVTVSS

SEQ ID NO: 123 - DNA, 348 bp, Artificial Sequence
  Synthetic
gaggtgcagctgttggagtctgggggaggcttggtacagcctggggggtccctgagactctcctgtgcagcctctggattcacctttagcagctatgccatgagctgggtccgccaggctccagggaaggggctggagtgggtctcaagtatttattctactggtggtgctacagcttacgcagactccgtgaagggccggttcaccatctccagagacaattccaagaacacgctgtatctgcaaatgaacagcctgagagccgaggacacggccgtatattactgtgcgaaatggtctaagggttttgactactggggccagggaaccctggtcaccgtctcgagc

SEQ ID NO: 124 - protein, 116 aa, Artificial Sequence
  Synthetic
EVQLLESGGGLVQPGGSLRLSCAASGFTFSSYAMSWVRQAPGKGLEWVSSIYSTGGATAYADSVKGRFTISRDNSKNTLYLQMNSLRAEDTAVYYCAKWSKGFDYWGQGTLVTVSS

SEQ ID NO: 125 - DNA, 352 bp, Artificial Sequence
  Synthetic
gaggtgcagctgttggagtctgggggaggcttggtacagcctggggggtccctgagactctcctgtgcagcctctggattcacctttagcagctatgccatgagctgggtccgccaggctccagggaaggggctggagtgggtctcaagtatttggaagtagggtattgtgacagtgagcttacgcagactccgtgaagggccggttcaccatctccagagacaattccaagaacacgctgtatctgcaaatgaacagcctgagagccgaggacacggccgtatattactgtgcgaaatcttctgctggttttgactactggggccagggaaccctggtcaccgtctcgagc

SEQ ID NO: 126 - protein, 113 aa, Artificial Sequence
  Synthetic
EVQLLESGGGLVQPGGSLRLSCAASGFTFSSYAMSWVRQAPGKGLEWVSSIWKQGIVTVYDSVKGRFTISRDNSKNTLYLQMNSLRAEDTAVYYCAKSSAGFDYWGQGTLVTV

SEQ ID NO: 127 - DNA, 352 bp, Artificial Sequence
  Synthetic
gaggtgcagctgttggagtctgggggaggcttggtacagcctggggggtccctgagactctcctgtgcagcctctggattcacctttagcagctatgccatgagctgggtccgccaggctccagggaaggggctggagtgggtctcaagtatttggcggaatggtattgttacagttagcttacgcagactccgtgaagggccggttcaccatctccagagacaattccaagaacacgctgtatctgcaaatgaacagcctgagagccgaggacacggccgtatattactgtgcgaaatcttctgctggttttgactactggggccagggaaccctggtcaccgtctcgagc

SEQ ID NO: 128 - protein, 115 aa, Artificial Sequence
  Synthetic
EVQLLESGGGLVQPGGSLRLSCAASGFTFSSYAMSWVRQAPGKGLEWVSSIWRNGIVTVYDSVKGRFTISRDNSKNTLYLQMNSLRAEDTAVYYCAKSSAGFDYWGQGTLVTVSS

SEQ ID NO: 129 - DNA, 352 bp, Artificial Sequence
  Synthetic
gaggtgcagctgttggagtctgggggaggcttggtacagcctggggggtccctgagactctcctgtgcagcctctggattcacctttagcagctatgccatgagctgggtccgccaggctccagggaaggggctggagtgggtctcagatatttggaagtagggtatggttacagtgagcttacgcagactccgtgaagggccggttcaccatctccagagacaattccaagaacacgctgtatctgcaaatgaacagcctgagagccgaggacacggccgtatattactgtgcgaaatcttctgctggttttgactactggggccagggaaccctggtcaccgtctcgagc

SEQ ID NO: 130 - protein, 115 aa, Artificial Sequence
  Synthetic
EVQLLESGGGLVQPGGSLRLSCAASGFTFSSYAMSWVRQAPGKGLEWVSDIWKQGMVTVYDSVKGRFTISRDNSKNTLYLQMNSLRAEDTAVYYCAKSSAGFDYWGQGTLVTVSS

SEQ ID NO: 131 - DNA, 352 bp, Artificial Sequence
  Synthetic
gaggtgcagctgttggagtctgggggaggcttggtacagcctggggggtccctgagactctcctgtgcagcctctggattcacctttagcagctatgccatgagctgggtccgccaggctccagggaaggggctggagtgggtctcatcgatttggaggtagggtctggcgacagcgagcttacgcagactccgtgaagggccggttcaccatctccagagacaattccaagaacacgctgtatctgcaaatgaacagcctgagagccgaggacacggccgtatattactgtgcgaaatcttctgctggttttgactactggggccagggaaccctggtcaccgtctcgagc

SEQ ID NO: 132 - protein, 115 aa, Artificial Sequence
  Synthetic
EVQLLESGGGLVQPGGSLRLSCAASGFTFSSYAMSWVRQAPGKGLEWVSSIWRQGLATAYDSVKGRFTISRDNSKNTLYLQMNSLRAEDTAVYYCAKSSAGFDYWGQGTLVTVSS

SEQ ID NO: 133 - DNA, 352 bp, Artificial Sequence
  Synthetic
gaggtgcagctgttggagtctgggggaggcttggtacagcctggggggtccctgagactctcctgtgcagcctctggattcacctttagcagctatgccatgagctgggtccgccaggctccagggaaggggctggagtgggtctcagagattgtggctactggtattttgacaagtagcttacgcagactccgtgaagggccggttcaccatctccagagacaattccaagaacacgctgtatctgcaaatgaacagcctgagagccgaggacacggccgtatattactgtgcgaaatcttctgctggttttgactactggggccagggaaccctggtcaccgtctcgagc

SEQ ID NO: 134 - protein, 115 aa, Artificial Sequence
  Synthetic
EVQLLESGGGLVQPGGSLRLSCAASGFTFSSYAMSWVRQAPGKGLEWVSEIVATGILTSYDSVKGRFTISRDNSKNTLYLQMNSLRAEDTAVYYCAKSSAGFDYWGQGTLVTVSS

SEQ ID NO: 135 - DNA, 352 bp, Artificial Sequence
  Synthetic
gaggtgcagctgttggagtctgggggaggcttggtacagcctggggggtccctgagactctcctgtgcagcctctggattcacctttagcagctatgccatgagctgggtccgccaggctccagggaaggggctggagtgggtctcatcgattggtcggtagggtttgattacagttagcttacgcagactccgtgaagggccggttcaccatctccagagacaattccaagaacacgctgtatctgcaaatgaacagcctgagagccgaggacacggccgtatattactgtgcgaaatcttctgctggttttgactactggggccagggaaccctggtcaccgtctcgagc

SEQ ID NO: 136 - protein, 115 aa, Artificial Sequence
  Synthetic
EVQLLESGGGLVQPGGSLRLSCAASGFTFSSYAMSWVRQAPGKGLEWVSSIGRQGLITVYDSVKGRFTISRDNSKNTLYLQMNSLRAEDTAVYYCAKSSAGFDYWGQGTLVTVSS

SEQ ID NO: 137 - DNA, 352 bp, Artificial Sequence
  Synthetic
gaggtgcagctgttggagtctgggggaggcttggtacagcctggggggtccctgagactctcctgtgcagcctctggattcacctttagcagctatgccatgagctgggtccgccaggctccagggaaggggctggagtgggtctcatctatttggtattagggtctggtgacagttagcttacgcagactccgtgaagggccggttcaccatctccagagacaattccaagaacacgctgtatctgcaaatgaacagcctgagagccgaggacacggccgtatattactgtgcgaaatcttctgctggttttgactactggggccagggaaccctggtcaccgtctcgagc

SEQ ID NO: 138 - protein, 115 aa, Artificial Sequence
  Synthetic
EVQLLESGGGLVQPGGSLRLSCAASGFTFSSYAMSWVRQAPGKGLEWVSSIWYQGLVTVYDSVKGRFTISRDNSKNTLYLQMNSLRAEDTAVYYCAKSSAGFDYWGQGTLVTVSS

SEQ ID NO: 139 - DNA, 352 bp, Artificial Sequence
  Synthetic
gaggtgcagctgttggagtctgggggaggcttggtacagcctggggggtccctgagactctcctgtgcagcctctggattcacctttagcagctatgccatgagctgggtccgccaggctccagggaaggggctggagtgggtctcagatatttggaagtagggttttgctacagcgagcttacgcagactccgtgaagggccggttcaccatctccagagacaattccaagaacacgctgtatctgcaaatgaacagcctgagagccgaggacacggccgtatattactgtgcgaaatcttctgctggttttgactactggggccagggaaccctggtcaccgtctcgagc

SEQ ID NO: 140 - protein, 114 aa, Artificial Sequence
  Synthetic
EVQLLESGGGLVQPGGSLRLSCAASGFTFSSYAMSWVRQAPGKGLEWVSDIWKQGFATADSVKGRFTISRDNSKNTLYLQMNSLRAEDTAVYYCAKSSAGFDYWGQGTLVTVSS

SEQ ID NO: 141 - DNA, 352 bp, Artificial Sequence; identical to SEQ ID NO: 125
  Synthetic

SEQ ID NO: 142 - protein, 115 aa, Artificial Sequence
  Synthetic
EVQLLESGGGLVQPGGSLRLSCAASGFTFSSYAMSWVRQAPGKGLEWVSSIWKQGIVTVYDSVKGRFTISRDNSKNTLYLQMNSLRAEDTAVYYCAKSSAGFDYWGQGTLVTVSS

SEQ ID NO: 143 - DNA, 352 bp, Artificial Sequence; identical to SEQ ID NO: 131
  Synthetic

SEQ ID NO: 144 - protein, 115 aa, Artificial Sequence; identical to SEQ ID NO: 132
  Synthetic

SEQ ID NO: 145 - DNA, 348 bp, Artificial Sequence
  Synthetic
gaggtgcagctgttggagtctgggggaggcttggtacagcctggggggtccctgagactctcctgtgcagcctctggattcacctttagcagctatgccatgagctgggtccgccaggctccagggaaggggctggagtgggtctcaagtatttggcggaatggtattgttacagtttacgcagactccgtgaagggccggttcaccatctccagagacaattccaagaacacgctgtatctgcaaatgaacagcctgagagccgaggacacggccgtatattactgtgcgaaatggtctgctgcttttgactactggggccagggaaccctggtcaccgtctcgagc

SEQ ID NO: 146 - protein, 116 aa, Artificial Sequence
  Synthetic
EVQLLESGGGLVQPGGSLRLSCAASGFTFSSYAMSWVRQAPGKGLEWVSSIWRNGIVTVYADSVKGRFTISRDNSKNTLYLQMNSLRAEDTAVYYCAKWSAAFDYWGQGTLVTVSS

SEQ ID NO: 147 - DNA, 348 bp, Artificial Sequence
  Synthetic
gaggtgcagctgttggagtctgggggaggcttggtacagcctggggggtccctgagactctcctgtgcagcctctggattcacctttagcagctatgccatgagctgggtccgccaggctccagggaaggggctggagtgggtctcaagtatttggcggaatggtattgttacagtttacgcagactccgtgaagggccggttcaccatctccagagacaattccaagaacacgctgtatctgcaaatgaacagcctgagagccgaggacacggccgtatattactgtgcgaaatggtctgctggttatgactactggggccagggaaccctggtcaccgtctcgagc

SEQ ID NO: 148 - protein, 116 aa, Artificial Sequence
  Synthetic
EVQLLESGGGLVQPGGSLRLSCAASGFTFSSYAMSWVRQAPGKGLEWVSSIWRNGIVTVYADSVKGRFTISRDNSKNTLYLQMNSLRAEDTAVYYCAKWSAGYDYWGQGTLVTVSS

SEQ ID NO: 149 - DNA, 348 bp, Artificial Sequence
  Synthetic
gaggtgcagctgttggagtctgggggaggcttggtacagcctggggggtccctgagactctcctgtgcagcctctggattcacctttagcagctatgccatgagctgggtccgccaggctccagggaaggggctggagtgggtctcaagtatttggcggaatggtattgttacagtttacgcagactccgtgaagggccggttcaccatctccagagacaattccaagaacacgctgtatctgcaaatgaacagcctgagagccgaggacacggccgtatattactgtgcgaaatggtctaagggttttgactactggggccagggaaccctggtcaccgtctcgagc

SEQ ID NO: 150 - protein, 116 aa, Artificial Sequence
  Synthetic
EVQLLESGGGLVQPGGSLRLSCAASGFTFSSYAMSWVRQAPGKGLEWVSSIWRNGIVTVYADSVKGRFTISRDNSKNTLYLQMNSLRAEDTAVYYCAKWSKGFDYWGQGTLVTVSS

SEQ ID NO: 151 - DNA, 348 bp, Artificial Sequence
  Synthetic
gaggtgcagctgttggagtctgggggaggcttggtacagcctggggggtccctgagactctcctgtgcagcctctggattcacctttagcagctatgccatgagctgggtccgccaggctccagggaaggggctggagtgggtctcatctatttggtatcagggtctggtgacagtttacgcagactccgtgaagggccggttcaccatctccagagacaattccaagaacacgctgtatctgcaaatgaacagcctgagagccgaggacacggccgtatattactgtgcgaaatggtctgctgcttttgactactggggccagggaaccctggtcaccgtctcgagc

SEQ ID NO: 152 - protein, 120 aa, Artificial Sequence
  Synthetic
EVQLLESGGGLVQPGGSLRLSCAASGFTFSSYAMETSWVRQAPGKGLEWVSSIWYQGLVTVYADSVKGRFTISRDNSKNTLYLQMETNSLRAEDTAVYYCAKWSAAFDYWGQGTLVTVSS

SEQ ID NO: 153 - DNA, 348 bp, Artificial Sequence; identical to SEQ ID NO: 147
  Synthetic

SEQ ID NO: 154 - protein, 116 aa, Artificial Sequence
  Synthetic
EVQLLESGGGLVQPGGSLRLSCAASGFTFSSYAMSWVRQAPGKGLEWVSSIWYQGLVTVYADSVKGRFTISRDNSKNTLYLQMNSLRAEDTAVYYCAKWSAGYDYWGQGTLVTVSS

SEQ ID NO: 155 - DNA, 348 bp, Artificial Sequence; identical to SEQ ID NO: 149
  Synthetic

SEQ ID NO: 156 - protein, 116 aa, Artificial Sequence
  Synthetic
EVQLLESGGGLVQPGGSLRLSCAASGFTFSSYAMSWVRQAPGKGLEWVSSIWYQGLVTVYADSVKGRFTISRDNSKNTLYLQMNSLRAEDTAVYYCAKWSKGFDYWGQGTLVTVSS

SEQ ID NO: 157 - protein, 6 aa, Artificial Sequence
  Synthetic
QGQSGS

SEQ ID NO: 158 - protein, 5 aa, Artificial Sequence
  Synthetic
GQSGS

SEQ ID NO: 159 - protein, 4 aa, Artificial Sequence
  Synthetic
QSGS

SEQ ID NO: 160 - protein, 7 aa, Artificial Sequence
  Synthetic
QGQSGQG

SEQ ID NO: 161 - protein, 6 aa, Artificial Sequence
  Synthetic
GQSGQG

SEQ ID NO: 162 - protein, 5 aa, Artificial Sequence
  Synthetic
QSGQG

SEQ ID NO: 163 - protein, 4 aa, Artificial Sequence
  Synthetic
SGQG

SEQ ID NO: 164 - protein, 6 aa, Artificial Sequence
  Synthetic
QGQSGQ

SEQ ID NO: 165 - protein, 5 aa, Artificial Sequence
  Synthetic
GQSGQ

SEQ ID NO: 166 - protein, 4 aa, Artificial Sequence
  Synthetic
QSGQ

SEQ ID NO: 167 - DNA, 804 bp, Artificial Sequence
  Synthetic
cagggccagtccggctcatatctgccctgccacttcgtgccaatcggggcctgtaacaataagggcggtggatctagtggtggctcaggcgggtctggcggcatttccagtggactcttgtcaggacgatccgataatcatggcgggtccgacatccagatgacacagagcccttcttccctctccgcaagcgttggcgacagggtcaccattacctgtagggcttctcagagcatctcaagctatctgaactggtaccagcagaaacctggaaaggctccaaaactgctgatttacgctgcctccagtcttcagtcaggcgtcccctccagatttagcggatcaggtagtggaactgattttacccttacaatatcttctctgcagccagaggacttcgccacatactattgtcagcaagacaatggttaccccagtacatttggcggagggacaaaggtcgagatcaaaaggaccgtagcagcaccaagcgtctttattttcccccccagtgacgaacagctgaagagcggaacagcttcagtggtgtgtctcctgaataacttctatccacgcgaggcaaaggtgcagtggaaggtggacaatgcactgcagtctggtaattcccaagaaagtgttactgagcaggattccaaggattcaacttactctctgtctagcaccctgactctttctaaagcagattatgagaagcataaggtctacgcttgcgaggtgacccaccaggggctttcctctccagttaccaagtcattcaaccggggtgagtgttgatgagaattc

SEQ ID NO: 168 - protein, 264 aa, Artificial Sequence
  Synthetic
QGQSGSGIALCPSHFCQLPQTGGGSSGGSGGSGGISSGLLSGRSDNHGGSDIQMTQSPSSLSASVGDRVTITCRASQSISSYLNWYQQKPGKAPKLLIYAASSLQSGVPSRFSGSGSGTDFTLTISSLQPEDFATYYCQQDNGYPSTFGGGTKVEIKRTVAAPSVFIFPPSDEQLKSGTASVVCLLNNFYPREAKVQWKVDNALQSGNSQESVTEQDSKDSTYSLSSTLTLSKADYEKHKVYACEVTHQGLSSPVTKSFNRGEC

SEQ ID NO: 169 - DNA, 786 bp, Artificial Sequence
  Synthetic
tatctgccctgccacttcgtgccaatcggggcctgtaacaataagggcggtggatctagtggtggctcaggcgggtctggcggcatttccagtggactcttgtcaggacgatccgataatcatggcgggtccgacatccagatgacacagagcccttcttccctctccgcaagcgttggcgacagggtcaccattacctgtagggcttctcagagcatctcaagctatctgaactggtaccagcagaaacctggaaaggctccaaaactgctgatttacgctgcctccagtcttcagtcaggcgtcccctccagatttagcggatcaggtagtggaactgattttacccttacaatatcttctctgcagccagaggacttcgccacatactattgtcagcaagacaatggttaccccagtacatttggcggagggacaaaggtcgagatcaaaaggaccgtagcagcaccaagcgtctttattttcccccccagtgacgaacagctgaagagcggaacagcttcagtggtgtgtctcctgaataacttctatccacgcgaggcaaaggtgcagtggaaggtggacaatgcactgcagtctggtaattcccaagaaagtgttactgagcaggattccaaggattcaacttactctctgtctagcaccctgactctttctaaagcagattatgagaagcataaggtctacgcttgcgaggtgacccaccaggggctttcctctccagttaccaagtcattcaaccggggtgagtgttgatgagaattc

SEQ ID NO: 170 - protein, 258 aa, Artificial Sequence
  Synthetic
GIALCPSHFCQLPQTGGGSSGGSGGSGGISSGLLSGRSDNHGGSDIQMTQSPSSLSASVGDRVTITCRASQSISSYLNWYQQKPGKAPKLLIYAASSLQSGVPSRFSGSGSGTDFTLTISSLQPEDFATYYCQQDNGYPSTFGGGTKVEIKRTVAAPSVFIFPPSDEQLKSGTASVVCLLNNFYPREAKVQWKVDNALQSGNSQESVTEQDSKDSTYSLSSTLTLSKADYEKHKVYACEVTHQGLSSPVTKSFNRGEC

SEQ ID NO: 171 - DNA, 1362 bp, Artificial Sequence
  Synthetic
gaagtgcagctgctcgaaagcggcggaggcttggtgcagccaggagggagcctgcgactgtcttgcgcagccagcggattcactttctcttcctatgccatgagctgggttcgacaggcacccggcaaaggtctcgagtgggtgtctagcatctggcgaaacggaatagttacagtgtatgccgatagcgtgaagggtcgctttactatttcacgggataattctaagaacaccctctacctgcaaatgaatagccttagggcagaagataccgccgtgtactactgtgccaaatggtccgcagcctttgactactggggccaggggacactggtgaccgtgtcctctgcatcaaccaaggggccatcagtgttcccactcgccccatgtagcagatcaacatctgaatccaccgcagcccttggctgccttgttaaggactatttcccagaacccgtgaccgtaagttggaactctggcgcccttacttctggggtgcacaccttcccagcagtgttgcagtccagtggcctttactctctgtctagtgtagtgactgtgccttcctctagtctcggtaccaagacctatacctgcaacgtagatcataagcccagcaatacaaaggttgataagagagtagagtcaaagtacggcccaccctgcccaccttgtccagctcccgagttcctgggcggaccctcagtctttctcttcccacctaaacccaaggatacccttatgatctccaggactcctgaggtgacctgcgttgtggtcgacgtgtcacaagaggaccctgaggtacagtttaactggtacgtggacggtgtggaggtacataacgctaagactaagccacgagaggagcaatttaactccacttacagggtggtcagcgtcctgaccgttctccatcaggactggctgaacgggaaggaatataagtgtaaggttagcaacaaaggtctgcccagttctatcgagaagacaatcagcaaggcaaaagggcagcctcgggaacctcaggtctacaccctccctcctagccaggaagagatgacaaagaaccaggtctctctcacctgcctggtgaaaggcttctatccatctgacattgctgtggagtgggaatccaacggccagcctgaaaataattataagaccacaccccccgtccttgattccgatggatctttcttcctgtacagtcgcctcaccgtcgacaaatcacggtggcaggaaggtaacgtgttcagctgttctgtcatgcatgaggctctgcataaccattacacacaaaagtctttgtcattgtctctcggatgatgagaattcattgatcataatcagccataccac

SEQ ID NO: 172 - protein, 442 aa, Artificial Sequence
  Synthetic
EVQLLESGGGLVQPGGSLRLSCAASGFTFSSYAMSWVRQAPGKGLEWVSSIWRNGIVTVYADSVKGRFTISRDNSKNTLYLQMNSLRAEDTAVYYCAKWSAAFDYWGQGTLVTVSSASTKGPSVFPLAPCSRSTSESTAALGCLVKDYFPEPVTVSWNSGALTSGVHTFPAVLQSSGLYSLSSVVTVPSSSLGTKTYTCNVDHKPSNTKVDKRVESKYGPPCPPCPAPEFLGGPSVFLFPPKPKDTLMISRTPEVTCVVVDVSQEDPEVQFNWYVDGVEVHNAKTKPREEQFNSTYRVVSVLTVLHQDWLNGKEYKCKVSNKGLPSSIEKTISKAKGQPREPQVYTLPPSQEEMTKNQVSLTCLVKGFYPSDIAVEWESNGQPENNYKTTPPVLDSDGSFFLYSRLTVDKSRWQEGNVFSCSVMHEALHNHYTQKSLSLSLG

SEQ ID NO: 173 - protein, 13 aa, Artificial Sequence
  Synthetic
GGGSSGGSGGSGG

SEQ ID NO: 174 - protein, 214 aa, Artificial Sequence
  Synthetic
DIQMTQSPSSLSASVGDRVTITCRASQSISSYLNWYQQKPGKAPKLLIYAASSLQSGVPSRFSGSGSGTDFTLTISSLQPEDFATYYCQQDNGYPSTFGGGTKVEIKRTVAAPSVFIFPPSDEQLKSGTASVVCLLNNFYPREAKVQWKVDNALQSGNSQESVTEQDSKDSTYSLSSTLTLSKADYEKHKVYACEVTHQGLSSPVTKSFNRGEC

SEQ ID NO: 175 - protein, 442 aa, Artificial Sequence; identical to SEQ ID NO: 172
  Synthetic

SEQ ID NO: 176 - protein, 117 aa, Artificial Sequence
  Synthetic
QVQLVQSGAEVKKPGASVKVSCKASGYTFTDYGFSWVRQAPGQGLEWMGWITAYNGNTNYAQKLQGRVTMTTDTSTSTVYMELRSLRSDDTAVYYCARDYFYGMDVWGQGTTVTVSS

SEQ ID NO: 177 - protein, 123 aa, Artificial Sequence
  Synthetic
QVQLVQSGAEVKKPGSSVKVSCKTSGDTFSTYAISWVRQAPGQGLEWMGGIIPIFGKAHYAQKFQGRVTITADESTSTAYMELSSLRSEDTAVYFCARKFHFVSGSPFGMDVWGQGTTVTVSS

SEQ ID NO: 178 - protein, 112 aa, Artificial Sequence
  Synthetic
QVQLVQSGAEVKKPGASVKVSCKASGYTFTSYDVHWVRQAPGQRLEWMGWLHADTGITKFSQKFQGRVTITRDTSASTAYMELSSLRSEDTAVYYCARERIQLWFDYWGQGT

SEQ ID NO: 179 - protein, 120 aa, Artificial Sequence
  Synthetic
QVQLVQSGAEVKKPGSSVKVSCKVSGGIFSTYAINWVRQAPGQGLEWMGGIIPIFGTANHAQKFQGRVTITADESTSTAYMELSSLRSEDTAVYYCARDQGIAAALFDYWGQGTLVTVSS

SEQ ID NO: 180 - protein, 110 aa, Artificial Sequence
  Synthetic
EVQLVESGGGLVQPGRSLRLSCAVSGFTFDDYVVHWVRQAPGKGLEWVSGNSGNIGYADSVKGRFTISRDNAKNSLYLQMNSLRAEDTALYYCAVPFDYWGQGTLVTVSS

SEQ ID NO: 181 - protein, 123 aa, Artificial Sequence
  Synthetic
QVQLVQSGAEVKKPGSSVKVSCKTSGDTFSSYAISWVRQAPGQGLEWMGGIIPIFGRAHYAQKFQGRVTITADESTSTAYMELSSLRSEDTAVYFCARKFHFVSGSPFGMDVWGQGTTVTVSS

SEQ ID NO: 182 - protein, 123 aa, Artificial Sequence
  Synthetic
QVQLVQSGAEVKKPGSSVKVSCKTSGGTFSSYAISWVRQAPGQGLEWMGGIIPIFGKAHYAQKFQGRVTITADESTTTAYMELSSLRSEDTAVYYCARKYDYVSGSPFGMDVWGQGTTVTVSS

SEQ ID NO: 183 - protein, 121 aa, Artificial Sequence
  Synthetic
QVQLVQSGAEVKKPGSSVKVSCKASGGTFSSYAINWVRQAPGQGLEWMGGIIPIFGSANYAQKFQDRVTITADESTSAAYMELSSLRSEDTAVYYCARDSSGWSRYYMDVWGQGTTVTVSS

SEQ ID NO: 184 - protein, 123 aa, Artificial Sequence
  Synthetic
QVQLVQSGAEVKEPGSSVKVSCKASGGTFNSYAISWVRQAPGQGLEWMGGIIPLFGIAHYAQKFQGRVTITADESTNTAYMDLSSLRSEDTAVYYCARKYSYVSGSPFGMDVWGQGTTVTVSS

SEQ ID NO: 185 - protein, 121 aa, Artificial Sequence
  Synthetic
EVQLVESGGGLVQPGRSLRLSCAASGITFDDYGMHWVRQAPGKGLEWVSGISWNRGRIEYADSVKGRFTISRDNAKNSLYLQMNSLRAEDTALYYCAKGRFRYFDWFLDYWGQGTLVTVSS

SEQ ID NO: 186 - protein, 120 aa, Artificial Sequence
  Synthetic
QMQLVQSGGGLVQPGGSLRLSCAASGFTFSSYWMSWVRQAPGKGLEWVANIKQDGSEKYYVDSVKGRFTISRDNAKNSLYLQMNSLRAEDTAVYYCARDYFWSGFSAFDIWGKGTLVTVS

SEQ ID NO: 187 - protein, 107 aa, Artificial Sequence
  Synthetic
EIVLTQSPATLSLSPGERATLSCRASQSVSSYLVWYQQKPGQAPRLLIYDASNRATGIPARFSGSGSGTDFTLTISSLEPEDFAVYYCQQRSNWPRTFGQGTKVEIK

SEQ ID NO: 188 - protein, 106 aa, Artificial Sequence
  Synthetic
EIVLTQSPATLSLSPGERATLSCRASQSVSSYLAWYQQKPGQAPRLLIYDASNRATGIPARFSGSGSGTDFTLTISSLEPEDFAVYYCQQRSNWPTFGQGTKVEIK

SEQ ID NO: 189 - protein, 107 aa, Artificial Sequence
  Synthetic
DIQMTQSPSSLSASVGDRVTITCRASQGISSWLAWYQQKPEKAPKSLIYAASSLQSGVPSRFSGSGSGTDFTLTISSLQPEDFATYYCQQYNSYPYTFGQGTKLEIK

SEQ ID NO: 190 - protein, 108 aa, Artificial Sequence
  Synthetic
EIVLTQSPGTLSLSPGERATLSCRASQSVSSSYLAWYQQKPGQAPRLLIYGASSRATGIPDRFSGSGSGTDFTLTISRLEPEDFAVYYCQQYGSSPWTFGQGTKVEIK

SEQ ID NO: 191 - protein, 106 aa, Artificial Sequence
  Synthetic
EIVLTQSPGTLSLSPGERATLSCRASQSVSSSYLAWYQQKPGQAPRLLIYGASSRATGIPDRFSGSGSGTDFTLTISRLEPEDFAVYYCQQYGSSPFGGGTKVEIK

SEQ ID NO: 192 - protein, 106 aa, Artificial Sequence
  Synthetic
EIVLTQSPATLSLSPGERATLSCRASQSVSSYLAWYQQKPGQAPRLLIYDASNRATGIPARFSGSGSGTDFTLTISSLEPEDFAVYYCQQRSNWPTFGQGTRLEIK

SEQ ID NO: 193 - protein, 107 aa, Artificial Sequence
  Synthetic
AIQLTQSPSSLSASVGDRVTITCRASQGISSALAWYQQKPGKAPKLLIYDASSLESGVPSRFSGSGSGTDFTLTISSLQPEDFATYYCQQFNSYPFTFGPGTKVDIK

SEQ ID NO: 194 - protein, 107 aa, Artificial Sequence
  Synthetic
DIVMTQSPSTLSASVGDRVTITCRASQGISSWLAWYQQKPGRAPKVLIYKASTLESGVPSRFSGSGSGTDFTLTISSLQPEDFATYYCQQSYSTPWTFGQGTKLEIK

SEQ ID NO: 195 - protein, 121 aa, Artificial Sequence
  Synthetic
EVQLVESGGGLVQPGGSLRLSCAASGFTFSRYWMSWVRQAPGKGLEWVANIKQDGSEKYYVDSVKGRFTISRDNAKNSLYLQMNSLRAEDTAVYYCAREGGWFGELAFDYWGQGTLVTVSS

SEQ ID NO: 196 - protein, 108 aa, Artificial Sequence
  Synthetic
EIVLTQSPGTLSLSPGERATLSCRASQRVSSSYLAWYQQKPGQAPRLLIYDASSRATGIPDRFSGSGSGTDFTLTISRLEPEDFAVYYCQQYGSLPWTFGQGTKVEIK

SEQ ID NO: 197 - protein, 118 aa, Artificial Sequence
  Synthetic
EVQLVESGGGLVQPGGSLRLSCAASGFTFSDSWIHWVRQAPGKGLEWVAWISPYGGSTYYADSVKGRFTISADTSKNTAYLQMNSLRAEDTAVYYCARRHWPGGFDYWGQGTLVTVSA

SEQ ID NO: 198 - protein, 118 aa, Artificial Sequence
  Synthetic
EVQLVESGGGLVQPGGSLRLSCAASGFTFSGSWIHWVRQAPGKGLEWVAWILPYGGSSYYADSVKGRFTISADTSKNTAYLQMNSLRAEDTAVYYCARRHWPGGFDYWGQGTLVTVSA

SEQ ID NO: 199 - protein, 108 aa, Artificial Sequence
  Synthetic
DIQMTQSPSSLSASVGDRVTITCRASQDVSTAVAWYQQKPGKAPKLLIYSASFLYSGVPSRFSGSGSGTDFTLTISSLQPEDFATYYCQQYLYHPATFGQGTKVEIKR

SEQ ID NO: 200 - protein, 108 aa, Artificial Sequence
  Synthetic
DIQMTQSPSSLSASVGDRVTITCRASQDVSTAVAWYQQKPGKAPKLLIYSASFLYSGVPSRFSGSGSGTDFTLTISSLQPEDFATYYCQQYYNVPWTFGQGTKVEIKR

SEQ ID NO: 201 - protein, 108 aa, Artificial Sequence
  Synthetic
DIQMTQSPSSLSASVGDRVTITCRASQDVSTAVAWYQQKPGKAPKLLIYSASFLYSGVPSRFSGSGSGTDFTLTISSLQPEDFATYYCQQYYAPPWTFGQGTKVEIKR

SEQ ID NO: 202 - protein, 108 aa, Artificial Sequence
  Synthetic
DIQMTQSPSSLSASVGDRVTITCRASQDVSTAVAWYQQKPGKAPKLLIYSASFLYSGVPSRFSGSGSGTDFTLTISSLQPEDFATYYCQQYYTVPWTFGQGTKVEIKR

SEQ ID NO: 203 - protein, 108 aa, Artificial Sequence
  Synthetic
DIQMTQSPSSLSASVGDRVTITCRASQVINTFLAWYQQKPGKAPKLLIYSASTLASGVPSRFSGSGSGTDFTLTISSLQPEDFATYYCQQYYTVPRTFGQGTKVEIKR

SEQ ID NO: 204 - protein, 108 aa, Artificial Sequence
  Synthetic
DIQMTQSPSSLSASVGDRVTITCRASQDVSTAVAWYQQKPGKAPKLLIYSASFLYSGVPSRFSGSGSGTDFTLTISSLQPEDFATYYCQQGYGVPRTFGQGTKVEIKR

SEQ ID NO: 205 - protein, 108 aa, Artificial Sequence
  Synthetic
DIQMTQSPSSLSASVGDRVTITCRASQDVSTAVAWYQQKPGKAPKLLIYSASFLYSGVPSRFSGSGSGTDFTLTISSLQPEDFATYYCQQYLFTPPTFGQGTKVEIKR

SEQ ID NO: 206 - protein, 108 aa, Artificial Sequence
  Synthetic
DIQMTQSPSSLSASVGDRVTITCRASQDVSTAVAWYQQKPGKAPKLLIYSASFLYSGVPSRFSGSGSGTDFTLTISSLQPEDFATYYCQQYFITPTTFGQGTKVEIKR

SEQ ID NO: 207 - protein, 108 aa, Artificial Sequence
  Synthetic
DIQMTQSPSSLSASVGDRVTITCRASQDVSTAVAWYQQKPGKAPKLLIYSASFLYSGVPSRFSGSGSGTDFTLTISSLQPEDFATYYCQQYYYTPPTFGQGTKVEIKR

SEQ ID NO: 208 - protein, 108 aa, Artificial Sequence
  Synthetic
DIQMTQSPSSLSASVGDRVTITCRASQDVSTAVAWYQQKPGKAPKLLIYSASFLYSGVPSRFSGSGSGTDFTLTISSLQPEDFATYYCQQFFYTPPTFGQGTKVEIKR

SEQ ID NO: 209 - protein, 108 aa, Artificial Sequence
  Synthetic
DIQMTQSPSSLSASVGDRVTITCRASQDVSTAVAWYQQKPGKAPKLLIYSASFLYSGVPSRFSGSGSGTDFTLTISSLQPEDFATYYCQQSLFTPPTFGQGTKVEIKR

SEQ ID NO: 210 - protein, 108 aa, Artificial Sequence
  Synthetic
DIQMTQSPSSLSASVGDRVTITCRASQDVSTAVAWYQQKPGKAPKLLIYSASFLYSGVPSRFSGSGSGTDFTLTISSLQPEDFATYYCQQSLYTPPTFGQGTKVEIKR

SEQ ID NO: 211 - protein, 108 aa, Artificial Sequence
  Synthetic
DIQMTQSPSSLSASVGDRVTITCRASQDVSTAVAWYQQKPGKAPKLLIYSASFLYSGVPSRFSGSGSGTDFTLTISSLQPEDFATYYCQQSWYHPPTFGQGTKVEIKR

SEQ ID NO: 212 - protein, 108 aa, Artificial Sequence
  Synthetic
DIQMTQSPSSLSASVGDRVTITCRASQDVSTAVAWYQQKPGKAPKLLIYSASFLYSGVPSRFSGSGSGTDFTLTISSLQPEDFATYYCQQYFYIPPTFGQGTKVEIKR

SEQ ID NO: 213 - protein, 108 aa, Artificial Sequence
  Synthetic
DIQMTQSPSSLSASVGDRVTITCRASQDVSTAVAWYQQKPGKAPKLLIYSASFLYSGVPSRFSGSGSGTDFTLTISSLQPEDFATYYCQQYWYTPTTFGQGTKVEIKR

SEQ ID NO: 214 - protein, 108 aa, Artificial Sequence
  Synthetic
DIQMTQSPSSLSASVGDRVTITCRASQDVSTAVAWYQQKPGKAPKLLIYSASFLYSGVPSRFSGSGSGTDFTLTISSLQPEDFATYYCQQSYFIPPTFGQGTKVEIKR

SEQ ID NO: 215 - protein, 141 aa, Artificial Sequence
  Synthetic
METGLRWLLLVAVLKGVQCLSVEESGGRLVTPGTPLTLTCTASGFTITNYHMFWVRQAPGKGLEWIGVITSSGIGSSSTTYYATWAKGRFTISKTSTTVNLRITSPTTEDTATYFCARDYFTNTYYALDIWGPGTLVTVSS

SEQ ID NO: 216 - protein, 118 aa, Artificial Sequence
  Synthetic
QVQLVQSGAEVKKPGASVKVSCKASGYTFTSYDVHWVRQAPGQRLEWMGWLHADTGITKFSQKFQGRVTITRDTSASTAYMELSSLRSEDTAVYYCARERIQLWFDYWGQGTLVTVSS

SEQ ID NO: 217 - protein, 113 aa, Artificial Sequence
  Synthetic
EVQLVESGGGLVQPGRSLRLSCAVSGFTFDDYVVHWVRQAPGKGLEWVSGISGNSGNIGYADSVKGRFTISRDNAKNSLYLQMNSLRAEDTALYYCAVPFDYWGQGTLVTVSS

SEQ ID NO: 218 - protein, 116 aa, Artificial Sequence
  Synthetic
MDTRAPTQLLGLLLLWLPGARCALVMTQTPSSTSTAVGGTVTIKCQASQSISVYLAWYQQKPGQPPKLLIYSASTLASGVPSRFKGSRSGTEYTLTISGVQREDAATYYCLGSAGS

SEQ ID NO: 219 - protein, 120 aa, Artificial Sequence
  Synthetic
EVQLLESGGGLVQPGGSLRLSCAASGFTFSSYIMMWVRQAPGKGLEWVSSIYPSGGITFYADTVKGRFTISRDNSKNTLYLQMNSLRAEDTAVYYCARIKLGTVTTVDYWGQGTLVTVSS

SEQ ID NO: 220 - protein, 110 aa, Artificial Sequence
  Synthetic
QSALTQPASVSGSPGQSITISCTGTSSDVGGYNYVSWYQQHPGKAPKLMIYDVSNRPSGVSNRFSGSKSGNTASLTISGLQAEDEADYYCSSYTSSSTRVFGTGTKVTVL

SEQ ID NO: 221 - protein, 118 aa, Artificial Sequence
  Synthetic
EVKLQESGPSLVKPSQTLSLTCSVTGYSITSDYWNWIRKFPGNKLEYVGYISYTGSTYYNPSLKSRISITRDTSKNQYYLQLNSVTSEDTATYYCARYGGWLSPFDYWGQGTTLTVSS

SEQ ID NO: 222 - protein, 120 aa, Artificial Sequence
  Synthetic
EVQLQESGPGLVAPSQSLSITCTVSGFSLTTYSINWIRQPPGKGLEWLGVMWAGGGTNSNSVLKSRLIISKDNSKSQVFLKMNSLQTDDTARYYCARYYGNSPYYAIDYWGQGTSVTVSS

SEQ ID NO: 223 - protein, 118 aa, Artificial Sequence
  Synthetic
EVKLQESGPSLVKPSQTLSLTCSVTGYSIISDYWNWIRKFPGNKLEYLGYISYTGSTYYNPSLKSRISITRDTSKNQYYLQLNSVTTEDTATYYCARRGGWLLPFDYWGQGTTLTVSS

SEQ ID NO: 224 - protein, 118 aa, Artificial Sequence
  Synthetic
EVKLQESGPSLVKPGASVKLSCKASGYTFTSYDINWVKQRPGQGLEWIGWIFPRDNNTKYNENFKGKATLTVDTSSTTAYMELHSLTSEDSAVYFCTKENWVGDFDYWGQGTTLTLSS

SEQ ID NO: 225 - protein, 114 aa, Artificial Sequence
  Synthetic
EVQLQQSGPDLVTPGASVRISCQASGYTFPDYYMNWVKQSHGKSLEWIGDIDPNYGGTTYNQKFKGKAILTVDRSSSTAYMELRSLTSEDSAVYYCARGALTDWGQGTSLTVSS

SEQ ID NO: 226 - protein, 106 aa, Artificial Sequence
  Synthetic
EIVLTQSPATLSLSPGERATLSCRASSSVSYIYWFQQKPGQSPRPLIYAAFNRATGIPARFSGSGSGTDYTLTISSLEPEDFAVYYCQQWSNNPLTFGQGTKVEIK

SEQ ID NO: 227 - protein, 114 aa, Artificial Sequence
  Synthetic
QVQLVQSGAEVKKPGASVKVSCKASGYTFPDYYMNWVRQAPGQGLEWMGDIDPNYGGTNYAQKFQGRVTMTRDTSISTAYMELSRLRSDDTAVYYCARGALTDWGQGTMVTVSS

SEQ ID NO: 228 - protein, 114 aa, Artificial Sequence
  Synthetic
QVQLVQSGAEVKKPGASVKVSCKASGYTFPDYYMNWVRQAPGQSLEWMGDIDPNYGGTNYNQKFQGRVTMTRDTSISTAYMELSRLRSDDTAVYYCARGALTDWGQGTMVTVSS

SEQ ID NO: 229 - protein, 114 aa, Artificial Sequence
  Synthetic
EVQLVQSGAEVKKPGASVKVSCKASGYTFPDYYMNWVRQAPGQSLEWMGDIDPNYGGTNYNQKFQGRVTMTVDRSSSTAYMELSRLRSDDTAVYYCARGALTDWGQGTMVTVSS

SEQ ID NO: 230 - protein, 114 aa, Artificial Sequence
  Synthetic
EVQLVESGGGLVQPGRSLRLSCTASGYTFPDYYMNWVRQAPGKGLEWVGDIDPNYGGTTYAASVKGRFTISVDRSKSIAYLQMSSLKTEDTAVYYCTRGALTDWGQGTMVTVSS

SEQ ID NO: 231 - protein, 114 aa, Artificial Sequence
  Synthetic
EVQLVESGGGLVQPGRSLRLSCTASGYTFPDYYMNWVRQAPGKGLEWVGDIDPNYGGTTYNASVKGRFTISVDRSKSIAYLQMSSLKTEDTAVYYCARGALTDWGQGTMVTVSS

SEQ ID NO: 232 - protein, 107 aa, Artificial Sequence
  Synthetic
DIVMTQSHKLMSTSVGDRVSITCKASQDVGTAVAWYQQKPGQSPKLLIYWASTRHTGVPDRFTGSGSGTDFTLTISNVQSEDLADYFCQQDSSYPLTFGAGTKVELK

SEQ ID NO: 233 - protein, 107 aa, Artificial Sequence
  Synthetic
DIVTTQSHKLMSTSVGDRVSITCKASQDVGTAVAWYQQKPGQSPKLLIYWASTRHTGVPDRFTGSGSGTDFTLTISNVQSEDLADYFCQQDSSYPLTFGAGTKVELK

SEQ ID NO: 234 - protein, 113 aa, Artificial Sequence
  Synthetic
DIVMTQSPSSLAVSVGEKVSMGCKSSQSLLYSSNQKNSLAWYQQKPGQSPKLLIDWASTRESGVPDRFTGSGSGTDFTLTISSVKAEDLAVYYCQQYYGYPLTFGAGTKLELK

SEQ ID NO: 235 - protein, 106 aa, Artificial Sequence
  Synthetic
DIVMTQSPAIMSASPGEKVTMTCSASSSIRYMHWYQQKPGTSPKRWISDTSKLTSGVPARFSGSGSGTSYALTISSMEAEDAATYYCHQRSSYPWTFGGGTKLEIK

SEQ ID NO: 236 - protein, 106 aa, Artificial Sequence
  Synthetic
QIVLSQSPAILSASPGEKVTMTCRASSSVSYIYWFQQKPGSSPKPWIYATFNLASGVPARFSGSGSGTSYSLTISRVETEDAATYYCQQWSNNPLTFGAGTKLELK

SEQ ID NO: 237 - protein, 106 aa, Artificial Sequence
  Synthetic
EIVLTQSPATLSLSPGERATLSCRASSSVSYIYWFQQKPGQAPRLLIYAAFNRATGIPARFSGSGSGTDYTLTISSLEPEDFAVYYCQQWSNNPLTFGQGTKVEIK

SEQ ID NO: 238 - protein, 106 aa, Artificial Sequence
  Synthetic
QIVLTQSPATLSLSPGERATLSCRASSSVSYIYWFQQKPGQSPRPLIYATFNLASGIPARFSGSGSGTSYTLTISRLEPEDFAVYYCQQWSNNPLTFGQGTKVEIK

SEQ ID NO: 239 - protein, 106 aa, Artificial Sequence
  Synthetic
DIQLTQSPSSLSASVGDRVTITCRASSGVSYIYWFQQKPGKAPKLLIYAAFNLASGVPSRFSGSGSGTEYTLTISSLQPEDFATYYCQQWSNNPLTFGQGTKVEIK

SEQ ID NO: 240 - protein, 106 aa, Artificial Sequence
  Synthetic
DIQLTQSPSSLSASVGDRVTITCRASSGVSYIYWFQQKPGKAPKPLIYAAFNLASGVPSRFSGSGSGTEYTLTISSLQPEDFATYYCQQWSNNPLTFGQGTKVEIK

SEQ ID NO: 241 - protein, 106 aa, Artificial Sequence
  Synthetic
DIQLTQSPSILSASVGDRVTITCRASSSVSYIYWFQQKPGKAPKPLIYATFNLASGVPSRFSGSGSGTSYTLTISSLQPEDFATYYCQQWSNNPLTFGQGTKVEIK

SEQ ID NO: 242 - protein, 124 aa, Artificial Sequence
  Synthetic
QVQLVQSGAEVKKPGASVKVSCKASGYTFTSYGISWVRQAPGQGLEWMGWISAYNGNTNYAQKLQGRVTMTTDTSTSTAYMELRSLRSDDTAVYYCARALPSGTILVGGWFDPWGQGTLVTVSS

SEQ ID NO: 243 - protein, 124 aa, Artificial Sequence
  Synthetic
EVQLVQSGGGVVQPGRSLRLSCAASGFTFSSYALSWVRQAPGKGLEWVSAISGGGGSTYYADSVKGRFTISRDNSKNTLYLQMNSLRAEDTAVYYCAKDVFPETFSMNYGMDVWGQGTLVTVSS

SEQ ID NO: 244 - protein, 128 aa, Artificial Sequence
  Synthetic
QVQLVQSGGGVVQPGGSLRLSCAASGFTFDDYAMHWVRQAPGKGLEWVSLISGDGGSTYYADSVKGRFTISRDNSKNSLYLQMNSLRTEDTALYYCAKVLLPCSSTSCYGSVGAFDIWGQGTTVTVSS

SEQ ID NO: 245 - protein, 117 aa, Artificial Sequence
  Synthetic
QVQLVQSGGSVVRPGESLRLSCVASGFIFDNYDMSWVRQVPGKGLEWVSRVNWNGGSTTYADAVKGRFTISRDNTKNSLYLQMNNLRAEDTAVYYCVREFVGAYDLWGQGTTVTVSS

SEQ ID NO: 246 - protein, 121 aa, Artificial Sequence
  Synthetic
QVQLVQSGAEVKKPGATVKVSCKVFGDTFRGLYIHWVRQAPGQGLEWMGGIIPIFGTANYAQKFQGRVTITTDESTSTAYMELSSLRSEDTAVYYCASGLRWGIWGWFDPWGQGTLVTVSS

SEQ ID NO: 247 - protein, 121 aa, Artificial Sequence
  Synthetic
EVQLVQSGAELKKPGSSVKVSCKAFGGTFSDNAISWVRQAPGQGPEWMGGIIPIFGKPNYAQKFQGRVTITADESTSTAYMVLSSLRSEDTAVYYCARTMVRGFLGVMDVWGQGTTVTVSS

SEQ ID NO: 248 - protein, 125 aa, Artificial Sequence
  Synthetic
QVQLVQSGGGLVQPGGSLRLSCAASGFTFSSYAMSWVRQAPGKGLEWVSAISGSGGSTYYADSVKGRFTISRDNSKNTLYLQMNSLRAEDTAVYYCAKDQFVTIFGVPRYGMDVWGQGTTVTVSS

SEQ ID NO: 249 - protein, 120 aa, Artificial Sequence
  Synthetic
QVQLVQSGAEVKKPGSSVKVSCKASGGTFSSYAISWVRQAPGQGLEWMGGIIPIFGTANYAQKFQGRVTITADKSTSTAYMELSSLRSEDTAVYYCARGRQMFGAGIDFWGPGTLVTVSS

SEQ ID NO: 250 - protein, 118 aa, Artificial Sequence
  Synthetic
EVQLVESGAEVKKPGSSVKVSCKVSGGTFGTYALNWVRQAPGQGLEWMGRIVPLIGLVNYAHNFEGRISITADKSTGTAYMELSNLRSDDTAVYYCAREVYGGNSDYWGQGTLVTVSS

SEQ ID NO: 251 - protein, 120 aa, Artificial Sequence
  Synthetic
QVQLVQSGGEVKKPGASVKVSCKASGYTLSSHGITWVRQAPGQGLEWMGWISAHNGHASNAQKVEDRVTMTTDTSTNTAYMELRSLTADDTAVYYCARVHAALYYGMDVWGQGTLVTVSS

SEQ ID NO: 252 - protein, 121 aa, Artificial Sequence
  Synthetic
QVQLQESGGGVVQPGRSLRLSCSASGFTFSRHGMHWVRQAPGKGLEWVAVISHDGSVKYYADSMKGRFSISRDNSNNTLYLQMDSLRADDTAVYYCARGLSYQVSGWFDPWGQGTLVTVSS

SEQ ID NO: 253 - protein, 110 aa, Artificial Sequence
  Synthetic
NFMLTQPHSVSESPGKTVTISCTRSSGSIASNYVQWYQQRPGSSPTTVIYEDNQRPSGVPDRFSGSIDTSSNSASLTISGLKTKDEADYYCQSYDGITVIFGGGTKLTVL

SEQ ID NO: 254 - protein, 111 aa, Artificial Sequence
  Synthetic
NFMLTQPHSVSGSPGKTVTLPCTRSSGSIASHYVQWYQQRPGSAPTTVIYEDNKRPSGVPDRFSGSIDSSSNSASLSISGLKTEDEADYYCQSYDSSNRWVFGGGTKLTVL

SEQ ID NO: 255 - protein, 115 aa, Artificial Sequence
  Synthetic
LPVLTQPASLSASPGASASLTCTLRSGLNVGSYRIYWYQQKPGSRPQYLLNYKSDSNKQQASGVPSRFSGSKDASANAGILLISGLQSEDEADYYCMIWYSSAVVFGGGTKLTVL

SEQ ID NO: 256 - protein, 111 aa, Artificial Sequence
  Synthetic
NFMLTQPHSVSESPGKTVTISCTRSSGNIASNYVQWYQQRPGSAPTTVIYEDNQRPSGVPDRFSGSIDSSSNSASLTISGLKTEDEADYYCQSYDSSNLWVFGGGTKLTVL

SEQ ID NO: 257 - protein, 108 aa, Artificial Sequence
  Synthetic
SSELTQDPAVSVALGQTVRITCQGDSLRSYYASWYQQKPGQAPVLVIYGKNNRPSGIPDRFSGSSSGNTASLTITGAQAEDEADYYCNSRDSSGNHYVFGTGTKVTVL

SEQ ID NO: 258 - protein, 108 aa, Artificial Sequence
  Synthetic
LPVLTQAPSVSVAPGKTARITCGGSDIGRKSVHWYQQKPGQAPALVIYSDRDRPSGISERFSGSNSGNTATLTISRVEAGDEADYYCQVWDNNSDHYVFGAGTELIVL

SEQ ID NO: 259 - protein, 109 aa, Artificial Sequence
  Synthetic
QSALTQPASVSGSPGQSITISCTGTSSDVGGYNYVSWYQQHPGKAPKLMIYDVSNRPSGVSNRFSGSKSGNTASLTISGLQAEDEADYYCSSYTSSTLPFGGGTKLTVL

SEQ ID NO: 260 - protein, 107 aa, Artificial Sequence
  Synthetic
EIVLTQSPATLSLSPGERATLSCRASQSIGNSLAWYQQKPGQAPRLLMYGASSRATGIPDRFSGSGAGTDFTLTISSLEPEDFATYYCQQHTIPTFSFGPGTKVEVK

SEQ ID NO: 261 - protein, 107 aa, Artificial Sequence
  Synthetic
DIVMTQTPSFLSASIGDRVTITCRASQGIGSYLAWYQQRPGEAPKLLIYAASTLQSGVPSRFSGSGSGTDFTLTISNLQPEDFATYYCQQLNNYPITFGQGTRLEIK

SEQ ID NO: 262 - protein, 105 aa, Artificial Sequence
  Synthetic
QSALTQPPSVSVSPGQTANIPCSGDKLGNKYAYWYQQKPGQSPVLLIYQDIKRPSRIPERFSGSNSADTATLTISGTQAMDEADYYCQTWDNSVVFGGGTKLTVL

SEQ ID NO: 263 - protein, 112 aa, Artificial Sequence
  Synthetic
NFMLTQPHSVSESPGKTVTISCTRSSGSIDSNYVQWYQQRPGSAPTTVIYEDNQRPSGVPDRFSGSIDSSSNSASLTISGLKTEDEADYYCQSYDSNNRHVIFGGGTKLTVL

SEQ ID NO: 264 - protein, 110 aa, Artificial Sequence
  Synthetic
NFMLTQPHSVSESPGKTVTISCTRSSGNIGTNYVQWYQQRPGSAPVALIYEDYRRPSGVPDRFSGSIDSSSNSASLIISGLKPEDEADYYCQSYHSSGWEFGGGTKLTVL

SEQ ID NO: 265 - protein, 108 aa, Artificial Sequence
  Synthetic
QSVLTQPPSVSVAPGQTARITCGGNNIGSKGVHWYQQKPGQAPVLVVYDDSDRPSGIPERFSGSNSGNTATLTISRVEAGDEADYYCQVWDSSSDHWVFGGGTKLTVL

SEQ ID NO: 266 - protein, 111 aa, Artificial Sequence
  Synthetic
NFMLTQPHSVSESPGKTVTISCTRSSGSIASNYVQWYQQRPGSAPTTVIYEDNQRPSGVPDRFSGSIDSSSNSASLTISGLKTEDEADYYCQSYDSTTPSVFGGGTKLTVL

SEQ ID NO: 267 - protein, 120 aa, Artificial Sequence
  Synthetic
QVQLVQSGAEVKKPGASVKVSCKASGYTFTSYGISWVRQAPGQGLEWMGWTSPHNGLTAFAQILEGRVTMTTDTSTNTAYMELRNLTFDDTAVYFCAKVHPVFSYALDVWGQGTLVTVSS

SEQ ID NO: 268 - protein, 118 aa, Artificial Sequence
  Synthetic
EVQLVESGAEVMNPGSSVRVSCRGSGGDFSTYAFSWVRQAPGQGLEWMGRIIPILGIANYAQKFQGRVTITADKSTSTAYMELSSLRSDDTAVYYCARDGYGSDPVLWGQGTLVTVSS

SEQ ID NO: 269 - protein, 118 aa, Artificial Sequence
  Synthetic
EVQLVQSGAEVKKPGASVKVSCKASGYTFTNYGISWVRQAPGQGLEWMGWISAYNGNTNYAQKVQGRVTMTTDTSTSTGYMELRSLRSDDTAVYYCARGDFRKPFDYWGQGTLVTVSS

SEQ ID NO: 270 - protein, 115 aa, Artificial Sequence
  Synthetic
EVQLVQSGPELKKPGASVKMSCKASGYTFTSYVMHWVKQAPGQRLEWIGYVNPFNDGTKYNEMFKGRATLTSDKSTSTAYMELSSLRSEDSAVYYCARQAWGYPWGQGTLVTVSS

SEQ ID NO: 271 - protein, 115 aa, Artificial Sequence
  Synthetic
EVQLVQSGAEVKKPGASVKMSCKASGYTFTSYVMHWVKQAPGQRLEWIGYVNPFNDGTKYNEMFKGRATLTSDKSTSTAYMELSSLRSEDTAVYYCARQAWGYPWGQGTLVTVSS

SEQ ID NO: 272 - protein, 115 aa, Artificial Sequence
  Synthetic
EVQLVQSGAEVKKPGASVKMSCKASGYTFTSYVMHWVRQAPGQRLEWIGYVNPFNDGTKYNEMFKGRATLTSDKSTSTAYMELSSLRSEDTAVYYCARQAWGYPWGQGTLVTVSS

SEQ ID NO: 273 - protein, 115 aa, Artificial Sequence
  Synthetic
EVQLVQSGAEVKKPGASVKVSCKASGYTFTSYVMHWVRQAPGQRLEWIGYVNPFNDGTKYNEMFKGRATLTSDKSTSTAYMELSSLRSEDTAVYYCARQAWGYPWGQGTLVTVSS

SEQ ID NO: 274 - protein, 115 aa, Artificial Sequence
  Synthetic
EVQLVQSGAEVKKPGASVKVSCKASGYTFTSYVMHWVRQAPGQRLEWIGYVNPFNDGTKYNEMFKGRATITSDKSTSTAYMELSSLRSEDTAVYYCARQAWGYPWGQGTLVTVSS

SEQ ID NO: 275 - protein, 111 aa, Artificial Sequence
  Synthetic
DIVLTQSPASLALSPGERATLSCRATESVEYYGTSLVQWYQQKPGQPPKLLIYAASSVDSGVPSRFSGSGSGTDFTLTINSLEEEDAAMYFCQQSRRVPYTFGQGTKLEIK

SEQ ID NO: 276 - protein, 111 aa, Artificial Sequence
  Synthetic
DIVLTQSPATLSLSPGERATLSCRATESVEYYGTSLVQWYQQKPGQPPKLLIYAASSVDSGVPSRFSGSGSGTDFTLTINSLEAEDAAMYFCQQSRRVPYTFGQGTKLEIK

SEQ ID NO: 277 - protein, 111 aa, Artificial Sequence
  Synthetic
EIVLTQSPATLSLSPGERATLSCRATESVEYYGTSLVQWYQQKPGQPPKLLIYAASSVDSGVPSRFSGSGSGTDFTLTINSLEAEDAAMYFCQQSRRVPYTFGQGTKLEIK

SEQ ID NO: 278 - protein, 111 aa, Artificial Sequence
  Synthetic
DIVLTQSPATLSLSPGERATLSCRATESVEYYGTSLVQWYQQKPGQPPKLLIYAASSVDSGVPSRFSGSGSGTDFTLTINSLEAEDAATYFCQQSRRVPYTFGQGTKLEIK

SEQ ID NO: 279 - protein, 123 aa, Artificial Sequence
  Synthetic
EVQLVQSGAEVKKPGSSVKVSCKASGGTFSSYAISWVRQAPGQGLEWMGGIIPIFGTANYAQKFQGRVTITADKSTSTAYMELSSLRSEDTAVYYCAREGTIYDSSGYSFDYWGQGTLVTVSS

SEQ ID NO: 280 - protein, 124 aa, Artificial Sequence
  Synthetic
EVQLVQSGAEVKKPGSSVKVSCKASGGTFSSYAISWVRQAPGQGLEWMGIINPSGGSTSYAQKFQGRVSMTRDTSTSTVYMELSSLTSEDTAVYYCARDLFPHIYGNYYGMDIWGQGTTVTVSS

SEQ ID NO: 281 - protein, 118 aa, Artificial Sequence
  Synthetic
QVQLVQSGAEVKKPGSSVKVSCKASGGTFSSYAISWVRQAPGQGLEWMGGIIPIFGTANYAQKFQGRVTITADKSTSTAYMELSSLRSEDTAVYYCARLAVPGAFDIWGQGTMVTVSS

SEQ ID NO: 282 - protein, 116 aa, Artificial Sequence
  Synthetic
EVQLVESGGGVVQPGRSLRLSCAASGFTFSSYAMHWVRQAPGKGLAVISYDGSNKYYADSVKGRFTISRDNSKNTLYLQMNSLRAEDTAVYYCARGQWLVTELDYWGQGTLVTVSS

SEQ ID NO: 283 - protein, 122 aa, Artificial Sequence
  Synthetic
EVQLVESGSEVEKPGSSVKVSCKASGGTFSDSGISWVRQAPGQGLEWMGGIIPMFATPYYAQKFQDRVTITADESTSTVYMELSGLRSDDTAVFYCARDRGRGHLPWYFDLWGRGTLVTVSS

SEQ ID NO: 284 - protein, 119 aa, Artificial Sequence
  Synthetic
EVQLVESGAEVKKPGSSVKVSCKASGGTFSSYAISWVRQAPGQGLEWMGGIIPIFGTANYAQKFQGRVTITADESTSTAYMELSSLRSEDTAVYYCARAPYYYYYMDVWGQGTTVTVSS

SEQ ID NO: 285 - protein, 124 aa, Artificial Sequence
  Synthetic
EVQLLESGAEVKKPGSSVKVSCKASGGTLSRYALSWVRQAPGQGPEWVGAIIPIFGTPHYSKKFQDRVIITVDTSTNTAFMELSSLRFEDTALYFCARGHDEYDISGYHRLDYWGQGTLVTVSS

SEQ ID NO: 286 - protein, 121 aa, Artificial Sequence
  Synthetic
QVQLVQSGSELKKPGSSVKVSCKASGYSFSGYYIHWVRQAPGQGLEWMGWIDPNSGVTNYVRRFQGRVTMTRDTSLSTAYMELSGLTADDTAVYYCARDENLWQFGYLDYWGQGTLVTVSS

SEQ ID NO: 287 - protein, 120 aa, Artificial Sequence
  Synthetic
QVQLVQSGAEVKKPGSSVKVSCKASGGTFSRYGVHWVRQAPGQGLEWMGRLIPIVSMTNYAQKFQDRVSITTDKSTGTAYMELRSLTSEDTALYYCASVGQQLPWVFFAWGQGTLVTVSS

SEQ ID NO: 288 - protein, 118 aa, Artificial Sequence
  Synthetic
QVQLVESGGGVVQPGRSLRLSCAASGFTFSSYAMHWVRQAPGKGLEWVAVISFDGSNKYYADSVRGRFTISRDNSKNTLYLQMNSLRTEDTAVYYCARGWLDRDIDYWGQGTLVTVSS

SEQ ID NO: 289 - protein, 118 aa, Artificial Sequence
  Synthetic
EVQLVESGGGVVQPGRSLRLSCAASGFTFSSYAMHWVRQAPGKGLEWVAVISFDGSNKYYADSVRGRFTISRDNSKNTLYLQMNSLRTEDTAVYYCARGWLDRDIDYWGQGTLVTVSS

SEQ ID NO: 290 - protein, 121 aa, Artificial Sequence
  Synthetic
EVQLVQSGGGLVQPGGSLRLSCAASGFTFSDYGMHWVRQPPGKGLEWLAVISYDGSYKIHADSVQGRFTISRDNAKNSVFLQMNSLKTEDTAVYYCTTDRKWLAWHGMDVWGQGTTVTVSS

SEQ ID NO: 291 - protein, 118 aa, Artificial Sequence
  Synthetic
EVQLVQSGAEVKKPGSSVKVSCKASGGTFSSYAISWVRQAPGQGLEWMGGIIPIFGTANYAQKFQGRVTITADESTSTAYMELSSLRSEDTAVYYCARDGIVADFQHWGQGTLVTVSS

SEQ ID NO: 292 - protein, 121 aa, Artificial Sequence
  Synthetic
EVQLVESGAEVKKPGASVKVSCKASGDTFSRYGITWVRQAPGRGLEWMGNIVPFFGATNYAQKFQGRLTITADKSSYTSYMDLSSLRSDDTAVYYCARDHFYGSGGYFDYWGQGTLVTVSS

SEQ ID NO: 293 - protein, 121 aa, Artificial Sequence
  Synthetic
EVQLLESGAEVKKPGASVKVSCKASGYTFNSYDINWVRQAPGQGLEWMGGIIPVFGTANYAESFQGRVTMTADHSTSTAYMELNNLRSEDTAVYYCARDRWHYESRPMDVWGQGTTVTVSS

SEQ ID NO: 294 - protein, 119 aa, Artificial Sequence
  Synthetic
EVQLVESGGGLVRPGGSLRLACAASGFSFSDYYMTWIRQAPGRGLEWIAYISDSGQTVHYADSVKGRFTISRDNTKNSLFLQVNTLRAEDTAVYYCAREDLLGYYLQSWGQGTLVTVSS

SEQ ID NO: 295 - protein, 131 aa, Artificial Sequence
  Synthetic
QVQLQQSGPGLVKPSQTLSLTCAISGDSVSSNSAAWNWIRQSPSRGLEWLGRTYYRSKWYNDYAVSVKSRITINPDTSKNQFSLQLNSVTPEDTAVYYCARDEPRAVAGSQAYYYYGMDVWGQGTTVTVSS

SEQ ID NO: 296 - protein, 124 aa, Artificial Sequence
  Synthetic
EVQLVQSGAEVKKPGASVKVSCKASGYTFTSYYMHWVRQAPGQGLEWMGIINPSDGSTSYAQKFQGRVTMTRDTSTSTVHMELSSLRSEDTAVYYCARDLFPHIYGNYYGMDIWGQGTTVTVSS

SEQ ID NO: 297 - protein, 118 aa, Artificial Sequence
  Synthetic
QMQLVQSGGGVVQPGRSLRLSCAASGFTFSSYAMHWVRQAPGKGLEWVAVISFDGSNKYYADSVRGRFTISRDNSKNTLYLQMNSLRTEDTAVYYCARGWLDRDIDYWGQGTLVTVSS

SEQ ID NO: 298 - protein, 118 aa, Artificial Sequence
  Synthetic
QVQLVQSGGGVVQPGRSLRLSCAASGFTFSSYAMHWVRQAPGKGLEWVAVISFDGSNKYYADSVRGRFTISRDNSKNTLYLQMNSLRTEDTAVYYCARGWLDRDIDYWGQGTLVTVSS

SEQ ID NO: 299 - protein, 110 aa, Artificial Sequence
  Synthetic
QSVLTQPPSVSAAPGQKVTISCSGNNSNIANNYVSWYQQLPGTAPKLLIYDNNYRPSGIPDRFSGSKSGTSATLDITGLQTGDEADYYCGVWDGSLTTGVFGGGTKLTVL

SEQ ID NO: 300 - protein, 107 aa, Artificial Sequence
  Synthetic
AIQMTQSPSSLSASVGDRVTITCRASQGISNYLAWYQQKPGKVPKLLIYAASTLESGVPSRFSGSGSGTDFTLTISSLQPEDLATYYCQQLHTFPLTFGGGTKVEIK

SEQ ID NO: 301 - protein, 111 aa, Artificial Sequence
  Synthetic
QPVLTQPPSASGSPGQSVTISCTGTSSDVGAYNFVSWYRQHPGKAPKLMIYEVNKRPSGVPDRFSGSKSGNTASLTVSGLQAEDEADYYCSSYAGTNSLGIFGTGTKLTVL

SEQ ID NO: 302 - protein, 111 aa, Artificial Sequence
  Synthetic
QSVVTQPPSVSAAPGQKVTISCSGSSSDIGNHYVSWYQQLPGTAPKLLIYDNNQRPSGIPDRFSGSKSGTSATLAITGLQTGDEADYYCGTWDNSLSPHLLFGGGTKLTVL

SEQ ID NO: 303 - protein, 110 aa, Artificial Sequence
  Synthetic
QSVLTQPPSVSAAPGQKVTISCSGSSSNMGNNYVSWYKQVPGTAPKLLIYENDKRPSGIPDRFSGSKSGTSATLGITGLQTGDEADYYCGTWDNSLSGFVFASGTKVTVL

SEQ ID NO: 304 - protein, 109 aa, Artificial Sequence
  Synthetic
QSALTQPASVSGSLGQSVTISCTGSSSDVGSYNLVSWYQQHPGKAPNLMIYDVSKRSGVSNRFSGSKSGNTASLTISGLQAEDEADYYCSSYTGISTVVFGGGTKLTVL

SEQ ID NO: 305 - protein, 110 aa, Artificial Sequence
  Synthetic
QSVLTQPASVSGSPGQSITISCTGTSSDVGSYNLVSWYQQHPGKAPKLMIYEVSKRPSGVSNRFSGSKSGNTASLTISGLQAEDEADYYCSSYGGFNNLLFGGGTKLTVL

SEQ ID NO: 306 - protein, 107 aa, Artificial Sequence
  Synthetic
DIVMTQSPSSLSASIGDRVTITCRASQRISAYVNWYQQKPGKAPKVLIYAASSLRSGVPSRFSGSGSGTDFTLTISSLQPEDFATYYCQQTYSSPWTFGQGTKVEIK

SEQ ID NO: 307 - protein, 112 aa, Artificial Sequence
  Synthetic
QSVLTQPPSASGSPGQSVTISCTGTSSDIGGYDSVSWYQQHPGKAPKLMIYDVSKRPSGVSNRFSGSKSGNTASLTISGLQAEDEADYYCSSYTSSSIFFYVFGTGTKVTVL

SEQ ID NO: 308 - protein, 110 aa, Artificial Sequence
  Synthetic
LPVLTQPASVSGSPGQSITISCTGTTSDIGGYDYVSWYQQHPGKAPKLMIYDVSKRPSGVSNRFSGSKSGNTASLTISGLQAEDEADYYCSSYTSSSTHVFGTGTKLTVL

SEQ ID NO: 309 - protein, 111 aa, Artificial Sequence
  Synthetic
QSALTQPASVSGSPGQSITISCTGTSSDVGGYNYVSWYQQHPGKAPKLMIYDVSNRPSGVSNRFSGSKSGNTASLTISGLQAEDEADYYCSSYRSSTLGPVFGGGTKLTVL

SEQ ID NO: 310 - protein, 110 aa, Artificial Sequence
  Synthetic
QAGLTQPPSVSEAPRQRVTISCSGSSSNIGNNAVNWYQQLPGKAPKLLIYYDDLLPSGVSDRFSGSKSGTSASLAISGLQSEDEADYYCAAWDDSLNGYVFGTGTKLTVL

SEQ ID NO: 311 - protein, 110 aa, Artificial Sequence
  Synthetic
QSALTQPRSVSGSPGQSVTISCTGTSSDVGGYNYVSWYQQHPGKAPKLMIYDVSKRPSGVPDRFSGSKSGNTASLTISGLQAEDEADYYCSSYTSSTTHVFGTGTKVTVL

SEQ ID NO: 312 - protein, 110 aa, Artificial Sequence
  Synthetic
QSVVTQPPSVSAAPGQKVTISCSGSSSNIGNNYVSWYQQLPGTAPKLLIYDNNKRPSGIPDRFSGSKSGTSATLGITGLQTGDEADYYCGTWDSSLSVWVFGGGTQLTVL

SEQ ID NO: 313 - protein, 112 aa, Artificial Sequence
  Synthetic
QSVLTQPASVSGSPGQSITISCTGTSSDVGGYNYVSWYQQHPGRAPRLMIYDVSNRPSGVSNRFSGSKSGNTASLTISGLQAEDEGDYYCSSYTSGGTLGPVFGGGTKLTVL

SEQ ID NO: 314 - protein, 110 aa, Artificial Sequence
  Synthetic
QAGLTQPPSASGTPGQRVTISCSGSSSNIGSNTVNWYQQLPGTAPKLLIYSNNQRPSGVPDRFSGSKSGTSASLAISGLQSEDEADYYCAAWDDSLNGWVFGGGTKLTVL

SEQ ID NO: 315 - protein, 107 aa, Artificial Sequence
  Synthetic
AIRMTQSPSSLSASVGDRVTITCRASQSISNYLNWYQQRPGKAPNLLIYAASSLQSGVPSRFSGSGSGTDFTLTISSLQPEDFATYYCQQTYSTPYTFGQGTKLEIK

SEQ ID NO: 316 - protein, 111 aa, Artificial Sequence
  Synthetic
QSVLTQPASVSGSPGQSITISCTGTSSDVGGYNYVSWYRQHPGKAPKLMIYDVSYRPSGVSNRFSGSKSGNTASLTISGLQAEDEADYYCSSYTDSSTRYVFGTGTKLTVL

SEQ ID NO: 317 - protein, 110 aa, Artificial Sequence
  Synthetic
QPVLTQPPSASGTPGQRVAISCSGSRSNIEINSVNWYQQLPGTAPKLLIYDNNKRPSGIPDRFSGSKSGTSATLGITGLQTGDEADYYCGSWDSSLSADVFGTGTKLTVL

SEQ ID NO: 318 - protein, 110 aa, Artificial Sequence
  Synthetic
QSVLTQPPSVSAAPGKKVTISCSGSSSNIGNNYVSWYQQLPGTAPKLLIYRNNQRPSGVPDRFSGSKSGTSASLAISGLQSEDEADYYCATWDDSLNGWVFGGGTKLTVL

SEQ ID NO: 319 - protein, 111 aa, Artificial Sequence
  Synthetic
QSVVTQPPSVSGAPGQRVTISCTGSSSNIGAGYDVHWYQQLPGTAPKLLIYGNNNRHSGVPDRFSGSKSGTSASLAITGLQAEDEAEFFCGTWDSRLTTYVFGSGTKLTVL

SEQ ID NO: 320 - protein, 110 aa, Artificial Sequence
  Synthetic
QSVVTQPPSVSAAPGQKVTISCSGSSSNIGNNYVSWYQQLPGTAPKLLIYDNNKRPSGIPDRFSGSKSGTSATLGITGLQTGDEADYYCGTWDSSLSAVVFGGGTKLTVL

SEQ ID NO: 321 - protein, 103 aa, Artificial Sequence
  Synthetic
VIWMTQSPSSLSASVGDRVTITCAASSLQSWYQQKPGKAPKLLIYEASTLESGVPSRFSGSGSGTEFTLTISSLQPEDFATYYCQQSYSTPYTFGQGTKLEIK

SEQ ID NO: 322 - protein, 110 aa, Artificial Sequence
  Synthetic
QSVVTQPPSVSAAPGQKVTISCSGSSSNIGNNYVSWYQQVPGTAPKLLIYDNNKRPSGIPDRFSGSNSDTSATLGITGLQTGDEADYYCGTWDSSLSAWVFGGGTKLTVL

SEQ ID NO: 323 - protein, 112 aa, Artificial Sequence
  Synthetic
QSVVTQPPSVSAAPGQKVTISCSGSSSNIGNNYVSWYQQLPGTAPKLLIYDNNKRPSGIPDRFSGSKSGTSATLGITGLQTGDEADYYCGTWDSSLSAGSVVFGGGTKLTVL

SEQ ID NO: 324 - protein, 108 aa, Artificial Sequence
  Synthetic
SYELMQPPSVSVAPGKTATIACGGENIGRKTVHWYQQKPGQAPVLVIYYDSDRPSGIPERFSGSNSGNTATLTISRVEAGDEADYYCLVWDSSSDHRIFGGGTKLTVL

SEQ ID NO: 325 - protein, 108 aa, Artificial Sequence
  Synthetic
SYELMQPPSVSVAPGKTATIACGGENIGRKTVHWYQQKPGQAPVLVIYYDSDRPSGIPERFSGSNSGNTATLTISRVEAGDEADYYCQVWDSSSDHRIFGGGTKLTVL

SEQ ID NO: 326 - protein, 108 aa, Artificial Sequence; identical to SEQ ID NO: 325
  Synthetic

SEQ ID NO: 327 - protein, 108 aa, Artificial Sequence; identical to SEQ ID NO: 325
  Synthetic

SEQ ID NO: 328 - protein, 447 aa, Artificial Sequence
  Synthetic
QVQLVQSGVEVKKPGASVKVSCKASGYTFTNYYMYWVRQAPGQGLEWMGGINPSNGGTNFNEKFKNRVTLTTDSSTTTAYMELKSLQFDDTAVYYCARRDYRFDMGFDYWGQGTTVTVSSASTKGPSVFPLAPCSRSTSESTAALGCLVKDYFPEPVTVSWNSGALTSGVHTFPAVLQSSGLYSLSSVVTVPSSSLGTKTYTCNVDHKPSNTKVDKRVESKYGPPCPPCPAPEFLGGPSVFLFPPKPKDTLMISRTPEVTCVVVDVSQEDPEVQFNWYVDGVEVHNAKTKPREEQFNSTYRVVSVLTVLHQDWLNGKEYKCKVSNKGLPSSIEKTISKAKGQPREPQVYTLPPSQEEMTKNQVSLTCLVKGFYPSDIAVEWESNGQPENNYKTTPPVLDSDGSFFLYSRLTVDKSRWQEGNVFSCSVMHEALHNHYTQKSLSLSLGK

SEQ ID NO: 329 - protein, 440 aa, Artificial Sequence
  Synthetic
QVQLVESGGGVVQPGRSLRLDCKASGITFSNSGMHWVRQAPGKGLEWVAVIWYDGSKRYYADSVKGRFTISRDNSKNTLFLQMNSLRAEDTAVYYCATNDDYWGQGTLVTVSSASTKGPSVFPLAPCSRSTSESTAALGCLVKDYFPEPVTVSWNSGALTSGVHTFPAVLQSSGLYSLSSVVTVPSSSLGTKTYTCNVDHKPSNTKVDKRVESKYGPPCPPCPAPEFLGGPSVFLFPPKPKDTLMISRTPEVTCVVVDVSQEDPEVQFNWYVDGVEVHNAKTKPREEQFNSTYRVVSVLTVLHQDWLNGKEYKCKVSNKGLPSSIEKTISKAKGQPREPQVYTLPPSQEEMTKNQVSLTCLVKGFYPSDIAVEWESNGQPENNYKTTPPVLDSDGSFFLYSRLTVDKSRWQEGNVFSCSVMHEALHNHYTQKSLSLSLGK

SEQ ID NO: 330 - protein, 218 aa, Artificial Sequence
  Synthetic
EIVLTQSPATLSLSPGERATLSCRASKGVSTSGYSYLHWYQQKPGQAPRLLIYLASYLESGVPARFSGSGSGTDFTLTISSLEPEDFAVYYCQHSRDLPLTFGGGTKVEIKRTVAAPSVFIFPPSDEQLKSGTASVVCLLNNFYPREAKVQWKVDNALQSGNSQESVTEQDSKDSTYSLSSTLTLSKADYEKHKVYACEVTHQGLSSPVTKSFNRGEC

SEQ ID NO: 331 - protein, 214 aa, Artificial Sequence
  Synthetic
EIVLTQSPATLSLSPGERATLSCRASQSVSSYLAWYQQKPGQAPRLLIYDASNRATGIPARFSGSGSGTDFTLTISSLEPEDFAVYYCQQSSNWPRTFGQGTKVEIKRTVAAPSVFIFPPSDEQLKSGTASVVCLLNNFYPREAKVQWKVDNALQSGNSQESVTEQDSKDSTYSLSSTLTLSKADYEKHKVYACEVTHQGLSSPVTKSFNRGEC

SEQ ID NO: 332 - protein, 122 aa, Artificial Sequence
  Synthetic
EVQLVESGGGLVQPGGSLRLSCAASGFTFSDSWIHWVRQAPGKGLEWVAWISPYGGSTYYADSVKGRFTISADTSKNTAYLQMNSLRAEDTAVYYCARRHWPGGFDYWGQGTLVTVSSASTK

SEQ ID NO: 333 - protein, 118 aa, Artificial Sequence [sequence omitted]

SEQ ID NO: 334 - protein, 447 aa, Artificial Sequence
  Synthetic
EVQLVESGGGLVQPGGSLRLSCAASGFTFSDSWIHWVRQAPGKGLEWVAWISPYGGSTYYADSVKGRFTISADTSKNTAYLQMNSLRAEDTAVYYCARRHWPGGFDYWGQGTLVTVSSASTKGPSVFPLAPSSKSTSGGTAALGCLVKDYFPEPVTVSWNSGALTSGVHTFPAVLQSSGLYSLSSVVTVPSSSLGTQTYICNVNHKPSNTKVDKKVEPKSCDKTHTCPPCPAPELLGGPSVFLFPPKPKDTLMISRTPEVTCVVVDVSHEDPEVKFNWYVDGVEVHNAKTKPREEQYASTYRVVSVLTVLHQDWLNGKEYKCKVSNKALPAPIEKTISKAKGQPREPQVYTLPPSREEMTKNQVSLTCLVKGFYPSDIAVEWESNGQPENNYKTTPPVLDSDGSFFLYSKLTVDKSRWQQGNVFSCSVMHEALHNHYTQKSLSLSPG

SEQ ID NO: 335 - protein, 214 aa, Artificial Sequence
  Synthetic
DIQMTQSPSSLSASVGDRVTITCRASQDVSTAVAWYQQKPGKAPKLLIYSASFLYSGVPSRFSGSGSGTDFTLTISSLQPEDFATYYCQQYLYHPATFGQGTKVEIKRTVAAPSVFIFPPSDEQLKSGTASVVCLLNNFYPREAKVQWKVDNALQSGNSQESVTEQDSKDSTYSLSSTLTLSKADYEKHKVYACEVTHQGLSSPVTKSFNRGEC

SEQ ID NO: 336 - protein, 121 aa, Artificial Sequence
  Synthetic
EVQLVESGGGLVQPGGSLRLSCAASGFTFSRFWMSWVRQAPGKGLEWVANINQDGTEKYYVDSVKGRFTISRDNAKNSLYLQMNSLRAGDTAVYYCANTYYDFWSGHFDYWGQGTLVTVSS

SEQ ID NO: 337 - protein, 121 aa, Artificial Sequence
  Synthetic
QEHLVESGGGVVQPGRSLRLSCEASGFTFSNFGMHWVRQAPGKGLEWVAALWSDGSNKYYADSVKGRVTISRDNSKNTLYLQMNSLRAEDTAVYYCARGRGAPGIPIFGYWGQGTLVTVSS

SEQ ID NO: 338 - protein, 130 aa, Artificial Sequence
  Synthetic
EVQLVESGGGLVKPGGSLRLSCAASGFTFSNAWMSWVRQAPGKGLEWVGRIKRKTDGGTTDYAAPVKGRFTISRDDSKNTLHLQMNSLKTEDTAVYYCTTDDIVVVPAVMREYYFGMDVWGQGTTVTVSS

SEQ ID NO: 339 - protein, 121 aa, Artificial Sequence
  Synthetic
QVQLVQSGAEVKKPGASVQVSCKASGYSFTGYYIHWVRQAPGQGLEWMGWINPNSGTKKYAHKFQGRVTMTRDTSIDTAYMILSSLISDDTAVYYCARDEDWNFGSWFDSWGQGTLVTVSS

SEQ ID NO: 340 - protein, 121 aa, Artificial Sequence
  Synthetic
QVHLVQSGAEVKKPGASVKVSCKASGYTFTGYYIHWVRQAPGHGLEWMGWLNPNTGTTKYIQNFQGRVTMTRDTSSSTAYMELTRLRSDDTAVYYCARDEDWNYGSWFDTWGQGTLVTVSS

SEQ ID NO: 341 - protein, 120 aa, Artificial Sequence
  Synthetic
EVQLVESGGGVVRPGGSLRLSCAASGFTFDDYGMTWVRQAPGRGLEWVSGIHWHGKRTGYADSVKGRFTISRDNAKKSLYLQMNSLKGEDTALYHCVRGGMSTGDWFDPWGQGTLVIVSS

SEQ ID NO: 342 - protein, 120 aa, Artificial Sequence
  Synthetic
EVQLVESGGGVVRPGGSLRLSCAASGFTFDDYGMTWVRQVPGKGLEWVSGIHWSGRSTGYADSVKGRFTISRDNAKNSLYLQMNSLRAEDTALYYCARGGMSTGDWFDPWGQGTLVTVSS

SEQ ID NO: 343 - protein, 115 aa, Artificial Sequence
  Synthetic
EVQLVESGGGLVQPGGSLRLSCAASGFTVGSNYMNWVRQAPGKGLEWVSVIYSGGSTYYADSVKGRFTISRLTSKNTLYLQMSSLRPEDTAVYYCARGIRGLDVWGQGTTVTVSS

SEQ ID NO: 344 - protein, 115 aa, Artificial Sequence
  Synthetic
EERLVESGGDLVQPGGSLRLSCAASGITVGTNYMNWVRQAPGKGLEWVSVISSGGNTHYADSVKGRFIMSRQTSKNTLYLQMNSLETEDTAVYYCARGIRGLDVWGQGTMVTVSS

SEQ ID NO: 345 - protein, 118 aa, Artificial Sequence
  Synthetic
QVQLVQSGAEVKMPGSSVRVSCKASGGIFSSSTISWVRQAPGQGLEWMGEIIPVFGTVNYAQKFQDRVIFTADESTTTAYMELSSLKSGDTAVYFCARNWGLGSFYIWGQGTMVTVSS

SEQ ID NO: 346 - protein, 115 aa, Artificial Sequence
  Synthetic
EVQLVESGGDLVHPGRSLRLSCAASGFPFDEYAMHWVRQVPGKGLEWVSGISWSNNNIGYADSVKGRFTISRDNAKNSLYLQMNSLRPEDTAFYYCAKSGIFDSWGQGTLVTVSS

SEQ ID NO: 347 - protein, 118 aa, Artificial Sequence
  Synthetic
EVQLVESGGGVVQPGRSLRLSCAASGFTFSSYGMHWVRQAPGKGLEWVTLISYEGRNKYYADSVKGRFTISRDNSKNTLYLQMNSLRAEDTAVYYCAKDRTLYGMDVWGQGTTVTVSS

SEQ ID NO: 348 - protein, 121 aa, Artificial Sequence
  Synthetic
QVTLRESGPALVKTTQTLTLTCTFSGFSLSTNRMCVTWIRQPPGKALEWLARIDWDGVKYYNTSLKTRLTISKDTSKNQVVLTMTNMDPVDTATFYCARSTSLTFYYFDYWGQGTLVTVSS

SEQ ID NO: 349 - protein, 115 aa, Artificial Sequence
  Synthetic
EVQLVESGGGLVQPGGSLRLSCAASEFTVGTNHMNWVRQAPGKGLEWVSVIYSGGNTFYADSVKGRFTISRHTSKNTLYLQMNSLTAEDTAVYYCARGLGGMDVWGQGTTVTVSS

SEQ ID NO: 350 - protein, 120 aa, Artificial Sequence
  Synthetic
EVQLVESGGGLVQRGESLRLYCAASGFTFSKYWMNWVRQAPGKGLEWVANIKGDGSEKYYVDSVKGRFTISRDNAKNSLYLQMNSLRAEDTAVYYCARDYWGSGYYFDFWGQGTLVTVSS

SEQ ID NO: 351 - protein, 130 aa, Artificial Sequence
  Synthetic
EVQLVESGGGLVQSGGSLRLSCAASGFTFSSYWMSWVRQAPGKGLEWVANIKQDGSEKYYVDSVKGRFTISRDNAKNSLYLQMNSLRADDTAVYYCARDDIVVVPAPMGYYYYYFGMDVWGQGTTVTVSS

SEQ ID NO: 352 - protein, 123 aa, Artificial Sequence
  Synthetic
EVQLVESGGGLVQPGRSLRLSCAASGFTFDDFAMHWVRQAPGKGLEWVSGISWTGGNMDYANSVKGRFTISREDAKNSLYLQMNSLRAADTALYYCVKDIRGIVATGGAFDIWGRGTMVTVSS

SEQ ID NO: 353 - protein, 115 aa, Artificial Sequence
  Synthetic
EVQLVESGGGLVQPGGSLRLSCAASGFTVGTNYMNWVRQAPGKGLEWISVIYSGGSTFYADSVKGRFTISRQTSQNTLYLQMNSLRPEDTAVYYCARGIRGFDIWGQGTMVTVSS

SEQ ID NO: 354 - protein, 115 aa, Artificial Sequence
  Synthetic
EVQLVESGGGLVQPGGSLRLSCAASGFTISTNYMNWVRQAPGKGLEWVAVIYSSGSTYYIDSVKGRFTISRLTSKNTVYLQMSSLNSEDTAVYYCARGIRGFDIWGQGTMVTVSS

SEQ ID NO: 355 - protein, 124 aa, Artificial Sequence
  Synthetic
EVQLVESGGGLVQPGRSLRLSCAASGFTIDDSAMHWVRQTPGKGLEWVSGISWKSGSIGYADSVRGRFTISRDNAKNSLYLQMNSLRVEDTALYYCVKDIRGNWNYGGNWFDPWGQGTLVTVSS

SEQ ID NO: 356 - protein, 115 aa, Artificial Sequence
  Synthetic
EVQLVESGGGLVQPGGSLRLSCEASGFTVGVNHMNWVRQAPGKGLEWVSVIFSSGRTFYGDYVKGRLTIFRQTSQNTVYLQMNSLRSEDTAIYYCARGIGGLDIWGRGTMVTVSS

SEQ ID NO: 357 - protein, 123 aa, Artificial Sequence
  Synthetic
EVQLVESGGGLVQPGRSLRLSCAASGFTFDDYALHWVRQAPGKGLEWVSGISWTGGTIDYADSVKGRFTISRDNAKNSLYLQMSSLRTEDTAIYYCTRDIRGNWKYGGWFDPWGQGTLVTVSS

SEQ ID NO: 358 - protein, 120 aa, Artificial Sequence
  Synthetic
QVQLVQSGTEVKKPGASVKVSCKASGYTFTAYYMHWVRQAPGQGLDWMGWISPNSGFTNYAQKFQGRVTMTRDTSINTFYMELSGLRSDDTAVYYCAREGSTHHNSFDPWGQGTLVTVSS

SEQ ID NO: 359 - protein, 114 aa, Artificial Sequence
  Synthetic
EVQLVESGGGLVQPGGSLRLSCAASGFTVGTNFMNWVRQAPGKGLEWVSAIYSGGTANYADSVKGRFTISRDTSRNTLYLQMNSLRTEDTAVYYCARGGGMDVWGQGTTVTVSS

SEQ ID NO: 360 - protein, 118 aa, Artificial Sequence
  Synthetic
QVQLVQSGAEVKKPGSSVKVSCKASGGTFNTYVLSWVRQAPGQGLEWMGEIIPILGAANYAQNFQGRVTFTTDESTNTAYMDLSSLRSEDTAVYYCARDRTSGGFDPWGQGTLVTVSS

SEQ ID NO: 361 - protein, 119 aa, Artificial Sequence
  Synthetic
QVQLVQSGAEVEKPGASVKVSCKASGYIFTHYGISWVRQAPGQGLEWVGWISPYNGYTDYAQKLQGRVTLTTDTSTTTAYMELRNLRSDDTAMYYCSRGRGPYWSFDLWGRGTLVTVSS

SEQ ID NO: 362 - protein, 106 aa, Artificial Sequence
  Synthetic
DIQMTQSPSTLSASVGDRVTITCRASQSISNWLAWYQQKPGKAPKLLIYKASSLESGVPSRFSGSGSGTEFTLTISSLQPDDFATYYCQQYHSYSYTFGQGTKEIK

SEQ ID NO: 363 - protein, 107 aa, Artificial Sequence
  Synthetic
DIQMTQSPSSLSASVGDRVTITCRASQGIRNDLGWYQQKPGKAPKRLIYTASSLQSGVPSRFSGSGSGTEFTLTISSLQPEDFATYYCLQHNSYPLTFGGGTKVAIK

SEQ ID NO: 364 - protein, 107 aa, Artificial Sequence
  Synthetic
DIQMTQSPSSLSASVGDRVTITCRTSQGIRNDLGWYQQKPGKAPKRLIYAASSLQSGVPSRFSGSGSGTEFTLTISSLQPEDFATYYCLQHNNYPYTFGQGTKLEIK

SEQ ID NO: 365 - protein, 112 aa, Artificial Sequence
  Synthetic
DIVMTQTPLSSPVTLGQPASISCRSSQTLVHGDGNTYLSWIQQRPGQPPRLLIYKVSNQFSGVPDRFSGSGAGTDFTLKISRVEAEDVGLYFCMQATHFPITFGQGTRLEIK

SEQ ID NO: 366 - protein, 112 aa, Artificial Sequence
  Synthetic
DIVMTQTPLSSPVTLGQPASISCRSSPSLVHSDGNTYLSWLQQRPGQPPRLLIYKISNRFSGVPDRFSGSGAGTDFTLKISRVEAEDVGVYYCMQATHFPITFGQGTRLEIR

SEQ ID NO: 367 - protein, 108 aa, Artificial Sequence
  Synthetic
DIQMTQSPSSLSASLGDRVTITCRASQSINSYLNWYQQKPGKAPKLLIYVASSLQSGVPSRFSGSGSGTEFTLTISNLQPEDFATYYCQQSYSTPPITFGQGTRLEIK

SEQ ID NO: 368 - protein, 108 aa, Artificial Sequence
  Synthetic
DIQMTQSPSSLSASVGDRVTITCRASQSISSYLNWYQQKPGKAPKLLIYVASSLQSGVPSRFSGSGSGTDFTLTISSLQPEDFATYYCQQSYSTPPITFGQGTRLEIK

SEQ ID NO: 369 - protein, 108 aa, Artificial Sequence
  Synthetic
DIQMTQSPSSLSASVGDRVTITCRASQTINIYLNWYQQKPGRAPRLLIYAASSLQSGVPSRFSGSGSGTDFTLTISSLQPEDFATYYCHQSYSTPPITFGQGTRLEIK

SEQ ID NO: 370 - protein, 108 aa, Artificial Sequence
  Synthetic
DIQMTQSPSSLSASVGDRVTITCRASQSMSSYLNWYQQKPGRAPKLLIFAASSLQSGVPSRFSGSGSGTDFTLTISSLQPEDFATYYCQQSYSTPPITFGQGTRLEIK

SEQ ID NO: 371 - protein, 108 aa, Artificial Sequence
  Synthetic
EIVLTQSPGTLSLSPGERATLSCRASQSFNFNYLAWYQQKPGQAPRLLIYGASSRATGIPDRFSGSGSGTDFTLTINRLEPEDFGVFYCQQYESAPWTFGQGTKVEIK

SEQ ID NO: 372 - protein, 105 aa, Artificial Sequence
  Synthetic
DIQMTQSPSSLSASVGDRVTITCRASQSISSYLNWYQQKPGKLLIYAASSLQSGVPSRFSGGGSGTDFTLTISSLRPEDFATYYCQQSYCTPPITFGQGTRLEIK

SEQ ID NO: 373 - protein, 108 aa, Artificial Sequence
  Synthetic
DIQMTQSPSSLSASVGDRVTITCRASQSISSYLNWYQQKPGKAPKLLIYAASSLQSGVPSRFSGSGSGTDFTLTISSLQPEDFATYYCQQSYSTPPITFGQGTRLEIK

SEQ ID NO: 374 - protein, 91 aa, Artificial Sequence
  Synthetic
DRVTITCRASQVISNYLAWYQQKPGKVPRLLIYAASTLQSGVPSRFSGSGSGTDFTLTISSLQPEDVATYYCQKYNSAPRTFGQGTKVEIK

SEQ ID NO: 375 - protein, 107 aa, Artificial Sequence
  Synthetic
DIQMTQSPSSLSASVGDRVTITCRASQNINNYLNWYQQKPGKAPKLLIYAASSFQNAVPSRFSGSGSGTDFTLTISSLQPEDFATYYCQQSYNTPLTFGGGTKVEIK

SEQ ID NO: 376 - protein, 107 aa, Artificial Sequence
  Synthetic
DIQMTQSPSSLSASVGDRVTITCRASQGIRNDLGWYQQKPGKAPKRLIYAASSLQSGVPSRFSGSGSGTEFTLTISSLQPEDFATYYCLQHNSYPYTFGQGTKLEIK

SEQ ID NO: 377 - protein, 108 aa, Artificial Sequence; identical to SEQ ID NO: 373
  Synthetic

SEQ ID NO: 378 - protein, 115 aa, Artificial Sequence
  Synthetic
QSLEESGGRLVKPDETLTITCTVSGIDLSSNGLTWVRQAPGEGLEWIGTINKDASAYYASWAKGRLTISKPSSTKVDLKITSPTTEDTATYFCGRIAFKTGTSIWGPGTLVTVSS

SEQ ID NO: 379 - protein, 112 aa, Artificial Sequence
  Synthetic
AIVMTQTPSPVSAAVGGTVTINCQASESVYSNNYLSWFQQKPGQPPKLLIYLASTLASGVPSRFKGSGSGTQFTLTISGVQCDDAATYYCIGGKSSSTDGNAFGGGTEVVVR

SEQ ID NO: 380 - protein, 121 aa, Artificial Sequence
  Synthetic
QMQLVQSGAEVKKPGSSVKVSCKASGGTFSSYAISWVRQAPGQGLEWMGGIIPIFGTANYAQKFQGRVTITADESTSTAYMELSSLRSEDTAVYYCARGNIVATITPLDYWGQGTLVTVSS

SEQ ID NO: 381 - protein, 110 aa, Artificial Sequence
  Synthetic
QPVLTQPPSVSAAPGQKVTISCSGSSSNIANNYVSWYQQLPGTAPKLLIFANNKRPSGIPDRFSGSKSGTSAALDITGLQTGDEADYYCGTWDSDLRAGVFGGGTKLTVL

SEQ ID NO: 382 - protein, 123 aa, Artificial Sequence; identical to SEQ ID NO: 279
  Synthetic

SEQ ID NO: 383 - protein, 118 aa, Artificial Sequence; identical to SEQ ID NO: 288
  Synthetic

SEQ ID NO: 384 - protein, 118 aa, Artificial Sequence; identical to SEQ ID NO: 289
  Synthetic

SEQ ID NO: 385 - protein, 118 aa, Artificial Sequence; identical to SEQ ID NO: 288
  Synthetic

SEQ ID NO: 386 - protein, 118 aa, Artificial Sequence; identical to SEQ ID NO: 289
  Synthetic

SEQ ID NO: 387 - protein, 118 aa, Artificial Sequence; identical to SEQ ID NO: 289
  Synthetic

SEQ ID NO: 388 - protein, 118 aa, Artificial Sequence; identical to SEQ ID NO: 288
  Synthetic

SEQ ID NO: 389 - protein, 120 aa, Artificial Sequence; identical to SEQ ID NO: 287
  Synthetic

SEQ ID NO: 390 - protein, 118 aa, Artificial Sequence; identical to SEQ ID NO: 297
  Synthetic

SEQ ID NO: 391 - protein, 118 aa, Artificial Sequence; identical to SEQ ID NO: 298
  Synthetic

SEQ ID NO: 392 - protein, 121 aa, Artificial Sequence
  Synthetic
QMQLVQSGAEVKKPGSSVKVSCKASGGTFSSYAYSWVRQAPGQGLEWMGGIIPSFGTANYAQKFQGRVTITADESTSTAYMELSSLRSEDTAVYYCARGPIVATITPLDYWGQGTLVTVSS

SEQ ID NO: 393 - protein, 121 aa, Artificial Sequence
  Synthetic
QMQLVQSGAEVKKPGSSVKVSCKASGGTFSSYAYSWVRQAPGQGLEWMGGIIPIFGTANYAQKFQGRVTITADESTSTAYMELSSLRSEDTAVYYCARGPIVATITPLDYWGQGTLVTVSS

SEQ ID NO: 394 - protein, 121 aa, Artificial Sequence; identical to SEQ ID NO: 392
  Synthetic

SEQ ID NO: 395 - protein, 121 aa, Artificial Sequence
  Synthetic
QMQLVQSGAEVKKPGSSVKVSCKASGGTFSSYAISWVRQAPGQGLEWMGGIIPAFGTANYAQKFQGRVTITADESTSTAYMELSSLRSEDTAVYYCARGPIVATITPLDYWGQGTLVTVSS

SEQ ID NO: 396 - protein, 108 aa, Artificial Sequence; identical to SEQ ID NO: 325
  Synthetic

SEQ ID NO: 397 - protein, 107 aa, Artificial Sequence
  Synthetic
AIRMTQSPSSLSASVGDRVTITCRASQSISSYLNWYQQKPGKAPKLLIYTTSSLKSGVPSRFSGSGSGTDFTLTISRLQPEDFATYYCQQSYSSTWTFGRGTKVEIK

SEQ ID NO: 398 - protein, 110 aa, Artificial Sequence; identical to SEQ ID NO: 299
  Synthetic

SEQ ID NO: 399 - protein, 110 aa, Artificial Sequence; identical to SEQ ID NO: 308
  Synthetic

SEQ ID NO: 400 - protein, 111 aa, Artificial Sequence; identical to SEQ ID NO: 309
  Synthetic

SEQ ID NO: 401 - protein, 110 aa, Artificial Sequence; identical to SEQ ID NO: 310
  Synthetic

SEQ ID NO: 402 - protein, 110 aa, Artificial Sequence; identical to SEQ ID NO: 311
  Synthetic

SEQ ID NO: 403 - protein, 110 aa, Artificial Sequence; identical to SEQ ID NO: 312
  Synthetic

SEQ ID NO: 404 - protein, 112 aa, Artificial Sequence; identical to SEQ ID NO: 313
  Synthetic

SEQ ID NO: 405 - protein, 110 aa, Artificial Sequence; identical to SEQ ID NO: 320
  Synthetic

SEQ ID NO: 406 - protein, 110 aa, Artificial Sequence; identical to SEQ ID NO: 322
  Synthetic

SEQ ID NO: 407 - protein, 112 aa, Artificial Sequence; identical to SEQ ID NO: 323
  Synthetic

SEQ ID NO: 408 - protein, 108 aa, Artificial Sequence; identical to SEQ ID NO: 324
  Synthetic

SEQ ID NO: 409 - protein, 108 aa, Artificial Sequence; identical to SEQ ID NO: 325
  Synthetic

SEQ ID NO: 410 - protein, 108 aa, Artificial Sequence; identical to SEQ ID NO: 325
  Synthetic

SEQ ID NO: 411 - protein, 108 aa, Artificial Sequence; identical to SEQ ID NO: 325
  Synthetic

SEQ ID NO: 412 - protein, 122 aa, Artificial Sequence
  Synthetic
QVQLVQSGSEVKKSGSSVKVSCKTSGGTFSITNYAINWVRQAPGQGLEWMGGILPIFGAAKYAQKFQDRVTITADESTNTAYLELSSLTSEDTAMYYCARGKRWLQSDLQYWGQGTLVTVSS

SEQ ID NO: 413 - protein, 110 aa, Artificial Sequence
  Synthetic
QPVLTQPASVSGSPGQSITISCTGSSSDVGSYDLVSWYQQSPGKVPKLLIYEGVKRPSGVSNRFSGSKSGNTASLTISGLQAEDEADYYCSSYAGTRNFVFGGGTQLTVL

SEQ ID NO: 414 - protein, 11 aa, Artificial Sequence
  Synthetic
RASQSISSYLN

SEQ ID NO: 415 - protein, 7 aa, Artificial Sequence
  Synthetic
KASRLQS

SEQ ID NO: 416 - protein, 7 aa, Artificial Sequence
  Synthetic
RALKPVT

SEQ ID NO: 417 - protein, 7 aa, Artificial Sequence
  Synthetic
AASSLQS

SEQ ID NO: 418 - protein, 7 aa, Artificial Sequence
  Synthetic
SYSTPNT

SEQ ID NO: 419 - protein, 7 aa, Artificial Sequence
  Synthetic
SASQLQS

SEQ ID NO: 420 - protein, 7 aa, Artificial Sequence
  Synthetic
ANSRPST

SEQ ID NO: 421 - protein, 7 aa, Artificial Sequence
  Synthetic
NASSLQS

SEQ ID NO: 422 - protein, 6 aa, Artificial Sequence
  Synthetic
YPYGPG

SEQ ID NO: 423 - protein, 7 aa, Artificial Sequence
  Synthetic
YASTLQS

SEQ ID NO: 424 - protein, 7 aa, Artificial Sequence
  Synthetic
DNGYPST

SEQ ID NO: 425 - protein, 5 aa, Artificial Sequence
  Synthetic
SYAMS

SEQ ID NO: 426 - protein, 14 aa, Artificial Sequence
  Synthetic
DITASGQRTTYADS

SEQ ID NO: 427 - protein, 7 aa, Artificial Sequence
  Synthetic
SKAIFDY

SEQ ID NO: 428 - protein, 14 aa, Artificial Sequence
  Synthetic
SINKDGHYTSYADS

SEQ ID NO: 429 - protein, 7 aa, Artificial Sequence
  Synthetic
NLDEFDY

SEQ ID NO: 430 - protein, 14 aa, Artificial Sequence
  Synthetic
SIMATGAGTLYADS

SEQ ID NO: 431 - protein, 7 aa, Artificial Sequence
  Synthetic
DGAGFDY

SEQ ID NO: 432 - protein, 14 aa, Artificial Sequence
  Synthetic
TITSSGAATYYADS

SEQ ID NO: 433 - protein, 7 aa, Artificial Sequence
  Synthetic
NYTGFDY

SEQ ID NO: 434 - protein, 14 aa, Artificial Sequence
  Synthetic
SIYSTGGATAYADS

SEQ ID NO: 435 - protein, 7 aa, Artificial Sequence
  Synthetic
SSAGFDY

SEQ ID NO: 436 - protein, 15 aa, Artificial Sequence
  Synthetic
SSIYSTGGATAYADS

SEQ ID NO: 437 - protein, 12 aa, Artificial Sequence
  Synthetic
SSAGQSRPGFDY

SEQ ID NO: 438 - protein, 12 aa, Artificial Sequence
  Synthetic
SSAGQSWPGFDY

SEQ ID NO: 439 - protein, 12 aa, Artificial Sequence
  Synthetic
SSAGQSFPGFDY

SEQ ID NO: 440 - protein, 7 aa, Artificial Sequence
  Synthetic
WSAAFDY

SEQ ID NO: 441 - protein, 7 aa, Artificial Sequence
  Synthetic
WSAGYDY

SEQ ID NO: 442 - protein, 7 aa, Artificial Sequence
  Synthetic
WSKGFDY

SEQ ID NO: 443 - protein, 14 aa, Artificial Sequence
  Synthetic
SSIWKQGIVTVYDS

SEQ ID NO: 444 - protein, 14 aa, Artificial Sequence
  Synthetic
SSIWRNGIVTVYDS

SEQ ID NO: 445 - protein, 14 aa, Artificial Sequence
  Synthetic
SDIWKQGMVTVYDS

SEQ ID NO: 446 - protein, 14 aa, Artificial Sequence
  Synthetic
SSIWRQGLATAYDS

SEQ ID NO: 447 - protein, 14 aa, Artificial Sequence
  Synthetic
SEIVATGILTSYDS

SEQ ID NO: 448 - protein, 14 aa, Artificial Sequence
  Synthetic
SSIGRQGLITVYDS

SEQ ID NO: 449 - protein, 14 aa, Artificial Sequence
  Synthetic
SSIWYQGLVTVYDS

SEQ ID NO: 450 - protein, 13 aa, Artificial Sequence
  Synthetic
SDIWKQGFATADS

SEQ ID NO: 451 - protein, 15 aa, Artificial Sequence
  Synthetic
SSIWRNGIVTVYADS

SEQ ID NO: 452 - protein, 15 aa, Artificial Sequence
  Synthetic
SSIWYQGLVTVYADS

SEQ ID NO: 453 - protein, 8 aa, Artificial Sequence
  Synthetic
DYFYGMDV

SEQ ID NO: 454 - protein, 14 aa, Artificial Sequence
  Synthetic
KFHFVSGSPFGMDV

SEQ ID NO: 455 - protein, 9 aa, Artificial Sequence
  Synthetic
ERIQLWFDY

SEQ ID NO: 456 - protein, 11 aa, Artificial Sequence
  Synthetic
DQGIAAALFDY

SEQ ID NO: 457 - protein, 4 aa, Artificial Sequence
  Synthetic
PFDY

SEQ ID NO: 458 - protein, 14 aa, Artificial Sequence
  Synthetic
KYDYVSGSPFGMDV

SEQ ID NO: 459 - protein, 12 aa, Artificial Sequence
  Synthetic
DSSGWSRYYMDV

SEQ ID NO: 460 - protein, 14 aa, Artificial Sequence
  Synthetic
KYSYVSGSPFGMDV

SEQ ID NO: 461 - protein, 12 aa, Artificial Sequence
  Synthetic
GRFRYFDWFLDY

SEQ ID NO: 462 - protein, 12 aa, Artificial Sequence
  Synthetic
DYFWSGFSAFDI

SEQ ID NO: 463 - protein, 9 aa, Artificial Sequence
  Synthetic
QQRSNWPRT

SEQ ID NO: 464 - protein, 8 aa, Artificial Sequence
  Synthetic
QQRSNWPT

SEQ ID NO: 465 - protein, 9 aa, Artificial Sequence
  Synthetic
QQYNSYPYT

SEQ ID NO: 466 - protein, 9 aa, Artificial Sequence
  Synthetic
QQYGSSPWT

SEQ ID NO: 467 - protein, 7 aa, Artificial Sequence
  Synthetic
QQYGSSP

SEQ ID NO: 468 - protein, 9 aa, Artificial Sequence
  Synthetic
QQFNSYPFT

SEQ ID NO: 469 - protein, 9 aa, Artificial Sequence
  Synthetic
QQSYSTPWT

SEQ ID NO: 470 - protein, 17 aa, Artificial Sequence
  Synthetic
WITAYNGNTNYAQKLQG

SEQ ID NO: 471 - protein, 17 aa, Artificial Sequence
  Synthetic
GIIPIFGKAHYAQKFQG

SEQ ID NO: 472 - protein, 17 aa, Artificial Sequence
  Synthetic
WLHADTGITKFSQKFQG

SEQ ID NO: 473 - protein, 17 aa, Artificial Sequence
  Synthetic
GIIPIFGTANHAQKFQG

SEQ ID NO: 474 - protein, 17 aa, Artificial Sequence
  Synthetic
GISGNSGNIGYADSVKG

SEQ ID NO: 475 - protein, 17 aa, Artificial Sequence
  Synthetic
GIIPIFGRAHYAQKFQG

SEQ ID NO: 476 - protein, 17 aa, Artificial Sequence
  Synthetic
GIIPIFGSANYAQKFQD

SEQ ID NO: 477 - protein, 17 aa, Artificial Sequence
  Synthetic
GIIPLFGIAHYAQKFQG

SEQ ID NO: 478 - protein, 17 aa, Artificial Sequence
  Synthetic
GISWNRGRIEYADSVKG

SEQ ID NO: 479 - protein, 7 aa, Artificial Sequence
  Synthetic
DASNRAT

SEQ ID NO: 480 - protein, 7 aa, Artificial Sequence
  Synthetic
GASSRAT

SEQ ID NO: 481 - protein, 7 aa, Artificial Sequence
  Synthetic
DASSLES

SEQ ID NO: 482 - protein, 7 aa, Artificial Sequence
  Synthetic
KASTLES

SEQ ID NO: 483 - protein, 5 aa, Artificial Sequence
  Synthetic
DYGFS

SEQ ID NO: 484 - protein, 5 aa, Artificial Sequence
  Synthetic
TYAIS

SEQ ID NO: 485 - protein, 5 aa, Artificial Sequence
  Synthetic
SYDVH

SEQ ID NO: 486 - protein, 5 aa, Artificial Sequence
  Synthetic
TYAIN

SEQ ID NO: 487 - protein, 5 aa, Artificial Sequence
  Synthetic
DYVVH

SEQ ID NO: 488 - protein, 5 aa, Artificial Sequence
  Synthetic
SYAIS

SEQ ID NO: 489 - protein, 5 aa, Artificial Sequence
  Synthetic
SYAIN

SEQ ID NO: 490 - protein, 5 aa, Artificial Sequence
  Synthetic
DYGMH

SEQ ID NO: 491 - protein, 11 aa, Artificial Sequence
  Synthetic
RASQSVSSYLV

SEQ ID NO: 492 - protein, 11 aa, Artificial Sequence
  Synthetic
RASQSVSSYLA

SEQ ID NO: 493 - protein, 11 aa, Artificial Sequence
  Synthetic
RASQGISSWLA

SEQ ID NO: 494 - protein, 12 aa, Artificial Sequence
  Synthetic
RASQSVSSSYLA

SEQ ID NO: 495 - protein, 11 aa, Artificial Sequence
  Synthetic
RASQGISSALA

SEQ ID NO: 496 - protein, 5 aa, Artificial Sequence
  Synthetic
TYSMN

SEQ ID NO: 497 - protein, 16 aa, Artificial Sequence
  Synthetic
SISSSGDYIYYADSVK

SEQ ID NO: 498 - protein, 11 aa, Artificial Sequence
  Synthetic
DLVTSMVAFDY

SEQ ID NO: 499 - protein, 11 aa, Artificial Sequence
  Synthetic
SGDALPQKYVF

SEQ ID NO: 500 - protein, 7 aa, Artificial Sequence
  Synthetic
EDSKRPS

SEQ ID NO: 501 - protein, 11 aa, Artificial Sequence
  Synthetic
YSTDRSGNHRV

SEQ ID NO: 502 - protein, 5 aa, Artificial Sequence
  Synthetic
RYWMS

SEQ ID NO: 503 - protein, 17 aa, Artificial Sequence
  Synthetic
NIKQDGSEKYYVDSVKG

SEQ ID NO: 504 - protein, 12 aa, Artificial Sequence
  Synthetic
EGGWFGELAFDY

SEQ ID NO: 505 - protein, 12 aa, Artificial Sequence
  Synthetic
RASQRVSSSYLA

SEQ ID NO: 506 - protein, 7 aa, Artificial Sequence
  Synthetic
DASSRAT

SEQ ID NO: 507 - protein, 9 aa, Artificial Sequence
  Synthetic
QQYGSLPWT

SEQ ID NO: 508 - protein, 5 aa, Artificial Sequence
  Synthetic
SYWMS

SEQ ID NO: 509 - protein, 16 aa, Artificial Sequence
  Synthetic
NIKQDGGEQYYVDSVK

SEQ ID NO: 510 - protein, 11 aa, Artificial Sequence
  Synthetic
DWNYGYYDMDV

SEQ ID NO: 511 - protein, 12 aa, Artificial Sequence
  Synthetic
RASQSVSSNYLA

SEQ ID NO: 512 - protein, 7 aa, Artificial Sequence
  Synthetic
GTSSRAT

SEQ ID NO: 513 - protein, 9 aa, Artificial Sequence
  Synthetic
QQYGSSIFT

SEQ ID NO: 514 - protein, 11 aa, Artificial Sequence
  Synthetic
  misc_feature (5)..(7): Xaa can be any naturally occurring amino acid
  misc_feature (9)..(10): Xaa can be any naturally occurring amino acid
RASQXXXTXXA

SEQ ID NO: 515 - protein, 7 aa, Artificial Sequence
  Synthetic
  misc_feature (4)..(4): Xaa can be any naturally occurring amino acid
  misc_feature (6)..(6): Xaa can be any naturally occurring amino acid
SASXLXS

SEQ ID NO: 516 - protein, 9 aa, Artificial Sequence
  Synthetic
  misc_feature (3)..(6): Xaa can be any naturally occurring amino acid
  misc_feature (8)..(8): Xaa can be any naturally occurring amino acid
QQXXXXPXT

SEQ ID NO: 517 - protein, 10 aa, Artificial Sequence
  Synthetic
  misc_feature (6)..(6): Xaa can be any naturally occurring amino acid
GFTFSXSWIH

SEQ ID NO: 518 - protein, 18 aa, Artificial Sequence
  Synthetic
  misc_feature (4)..(4): Xaa can be any naturally occurring amino acid
  misc_feature (10)..(10): Xaa can be any naturally occurring amino acid
AWIXPYGGSXYYADSVKG

SEQ ID NO: 519 - protein, 9 aa, Artificial Sequence
  Synthetic
RHWPGGFDY

SEQ ID NO: 520 - protein, 11 aa, Artificial Sequence
  Synthetic
RASQDVSTAVA

SEQ ID NO: 521 - protein, 7 aa, Artificial Sequence
  Synthetic
SASFLYS

SEQ ID NO: 522 - protein, 9 aa, Artificial Sequence
  Synthetic
QQYLYHPAT

SEQ ID NO: 523 - protein, 10 aa, Artificial Sequence
  Synthetic
GFTFSDSWIH

SEQ ID NO: 524 - protein, 18 aa, Artificial Sequence
  Synthetic
AWISPYGGSTYYADSVKG

SEQ ID NO: 525 - protein, 17 aa, Artificial Sequence
  Synthetic
  misc_feature (8)..(10): Xaa can be any naturally occurring amino acid
KSSQSLLXXXTRKNYLA

SEQ ID NO: 526 - protein, 7 aa, Artificial Sequence
  Synthetic
WASTRES

SEQ ID NO: 527 - protein, 8 aa, Artificial Sequence
  Synthetic
  misc_feature (1)..(1): Xaa can be any naturally occurring amino acid
XQSYDVVT

SEQ ID NO: 528 - protein, 5 aa, Artificial Sequence
  Synthetic
  misc_feature (4)..(4): Xaa can be any naturally occurring amino acid
SYWXH

SEQ ID NO: 529 - protein, 17 aa, Artificial Sequence
  Synthetic
  misc_feature (7)..(7): Xaa can be any naturally occurring amino acid
  misc_feature (9)..(9): Xaa can be any naturally occurring amino acid
  misc_feature (12)..(13): Xaa can be any naturally occurring amino acid
  misc_feature (16)..(16): Xaa can be any naturally occurring amino acid
YINPSSXYXEYXXKFXD

SEQ ID NO: 530 - protein, 13 aa, Artificial Sequence
  Synthetic
  misc_feature (5)..(5): Xaa can be any naturally occurring amino acid
  misc_feature (13)..(13): Xaa can be any naturally occurring amino acid
SGWLXHGDYYFDX

SEQ ID NO: 531 - protein, 17 aa, Artificial Sequence
  Synthetic
KSSQSLLNSRTRKNYLA

SEQ ID NO: 532 - protein, 8 aa, Artificial Sequence
  Synthetic
QQSYDVVT

SEQ ID NO: 533 - protein, 5 aa, Artificial Sequence
  Synthetic
SYWMH

SEQ ID NO: 534 - protein, 17 aa, Artificial Sequence
  Synthetic
YINPSSDYNEYSEKFMD

SEQ ID NO: 535 - protein, 13 aa, Artificial Sequence
  Synthetic
SGWLVHGDYYFDY

SEQ ID NO: 536 - protein, 17 aa, Artificial Sequence
  Synthetic
KSSQSLLHTSTRKNYLA

SEQ ID NO: 537 - protein, 8 aa, Artificial Sequence
  Synthetic
KQSYDVVT

SEQ ID NO: 538 - protein, 10 aa, Artificial Sequence
  Synthetic
GYIFTSYWMH

SEQ ID NO: 539 - protein, 17 aa, Artificial Sequence
  Synthetic
YINPSSGYHEYNQKFID

SEQ ID NO: 540 - protein, 13 aa, Artificial Sequence
  Synthetic
SGWLIHGDYYFDF

SEQ ID NO: 541 - protein, 5 aa, Artificial Sequence
  Synthetic
SYWIH

SEQ ID NO: 542 - protein, 10 aa, Artificial Sequence
  Synthetic
GTTFTSYWIH

SEQ ID NO: 543 - protein, 14 aa, Artificial Sequence
  Synthetic
  MISC_FEATURE (4)..(4): Xaa=Asn or Ser
  MISC_FEATURE (5)..(5): Xaa=Thr or Arg or Ser
  MISC_FEATURE (9)..(9): Xaa=Ala or Gly
TGTXXDVGXYNYVS

SEQ ID NO: 544 - protein, 7 aa, Artificial Sequence
  Synthetic
  MISC_FEATURE (1)..(1): Xaa=Glu or Asp
  MISC_FEATURE (3)..(3): Xaa=Ile or Asn or Asp
  MISC_FEATURE (4)..(4): Xaa=Asp or His or Asn
XVXXRPS

SEQ ID NO: 545 - protein, 10 aa, Artificial Sequence
  Synthetic
  MISC_FEATURE (3)..(3): Xaa=Phe or Tyr
  MISC_FEATURE (5)..(5): Xaa=Asn or Ser
  MISC_FEATURE (6)..(6): Xaa=Arg or Thr or Ser
  MISC_FEATURE (7)..(7): Xaa=Gly or Ser
  MISC_FEATURE (8)..(8): Xaa=Ile or Thr
SSXTXXXXRV

SEQ ID NO: 546 - protein, 5 aa, Artificial Sequence
  Synthetic
  MISC_FEATURE (1)..(1): Xaa=Lys or Arg or Thr or Gln or Gly or Ala or Trp or Met or Ile or Ser
  MISC_FEATURE (3)..(3): Xaa=Val or Arg or Lys or Leu or Met or Ile
  MISC_FEATURE (5)..(5): Xaa=His or Thr or Asn or Gln or Ala or Val or Tyr or Trp or Phe or Met
XYXMX

SEQ ID NO: 547 - protein, 17 aa, Artificial Sequence
  Synthetic
  MISC_FEATURE (8)..(8): Xaa=Phe or Ile
  MISC_FEATURE (14)..(14): Xaa= Ser or Thr
SIYPSGGXTFYADXVKG

SEQ ID NO: 548 - protein, 11 aa, Artificial Sequence
  Synthetic
  MISC_FEATURE (10)..(10): Xaa= Glu or Asp
IKLGTVTTVXY

SEQ ID NO: 549 - protein, 14 aa, Artificial Sequence
  Synthetic
TGTSSDVGGYNYVS

SEQ ID NO: 550 - protein, 7 aa, Artificial Sequence
  Synthetic
DVSNRPS

SEQ ID NO: 551 - protein, 10 aa, Artificial Sequence
  Synthetic
SSYTSSSTRV

SEQ ID NO: 552 - protein, 5 aa, Artificial Sequence
  Synthetic
SYIMM

SEQ ID NO: 553 - protein, 17 aa, Artificial Sequence
  Synthetic
SIYPSGGITFYADTVKG

SEQ ID NO: 554 - protein, 11 aa, Artificial Sequence
  Synthetic
IKLGTVTTVDY

SEQ ID NO: 555 - protein, 5 aa, Artificial Sequence
  Synthetic
MYMMM

SEQ ID NO: 556 - protein, 17 aa, Artificial Sequence
  Synthetic
SIYPSGGITFYADSVKG

SEQ ID NO: 557 - protein, 14 aa, Artificial Sequence
  Synthetic
TGTSSDVGAYNYVS

SEQ ID NO: 558 - protein, 17 aa, Artificial Sequence
  Synthetic
  MISC_FEATURE (1)..(1): Xaa= Arg or SerLys
  MISC_FEATURE (2)..(2): Xaa= Ala or Ser
  MISC_FEATURE (4)..(4): Xaa= Arg or Asn or Asp or Gln or Glu or His or Lys or Met or Ser
  MISC_FEATURE (11)..(11): Xaa= Asn or Asp or absent
  MISC_FEATURE (12)..(12): Xaa= Ala or Gln or Glu or Leu or Lys or Met or Pro or Ser or Thr or Tyr or Val
  MISC_FEATURE (13)..(13): Xaa= Phe or Leu or Ile or Met or Val or Ser or Pro or Thr or Ala or Tyr or His or Gln or Asn or Lys or Asp or Glu or Cys or Trp or Arg or Gly
  MISC_FEATURE (14)..(14): Xaa= Arg or Asn or Ser or Thr
  MISC_FEATURE (15)..(15): Xaa= Ala or Arg or Asn or Cys or Gln or Glu or His or Ile or Leu or Lys or Met or Phe or Ser or Thr or Tyr or Val
  MISC_FEATURE (16)..(16): Xaa= Ile or Leu or Met or Val
  MISC_FEATURE (17)..(17): Xaa= Ala or Arg or Asn or Gln or Glu or His or Ile or Lys or Met or Phe or Ser or Thr or Tyr
XXSXSLLYSSXXXXXXX

SEQ ID NO: 559 - protein, 6 aa, Artificial Sequence
  Synthetic
  MISC_FEATURE (1)..(1): Xaa= Phe or Leu or Ile or Met or Val or Ser or Pro or Thr or Ala or Tyr or His or Gln or Asn or Lys or Asp or Glu or Cys or Trp or Arg or Gly
  MISC_FEATURE (2)..(2): Xaa= Ala or Cys or Gly or Ser or Thr or Val
  MISC_FEATURE (3)..(3): Xaa= Ala or Cys or His or Ile or Leu or Met or Phe or Ser or Thr or Tyr or Val
  MISC_FEATURE (4)..(4): Xaa= Arg or Asn or Asp or Gln or Glu or Lys pr Ser or Thr
  MISC_FEATURE (5)..(5): Xaa= Ala or Arg or Asn or Asp or Gln or Glu or Gly or His or Lys or Met or Phe or Pro or Ser or Thr or Tyr
  MISC_FEATURE (6)..(6): Xaa= Ala or Asn or Ser or Thr
XXXXXX

SEQ ID NO: 560 - protein, 9 aa, Artificial Sequence
  Synthetic
  MISC_FEATURE (1)..(1): Xaa= Arg or Asn or Gln or Glu or His
  MISC_FEATURE (3)..(3): Xaa= Phe or Leu or Ile or Met or Val or Se or Pro or Thr or Ala or Tyr or His or Gln or Asn or Lys or Asp or Glu or Cys or Trp or Arg or Gly
  MISC_FEATURE (4)..(4): Xaa= Ala or Arg or Asn or Cys or Gln or Glu or His or Ile or Leu or Lys or Met or Phe or Ser or Thr or Tyr or Val
  MISC_FEATURE (5)..(5): Xaa= Asn or Gly or Ser
  MISC_FEATURE (6)..(6): Xaa= Ala or Arg or Asn or Asp or Cys or Gln or Glu or Gly or His or Ile or Leu or Lys or Met or Phe or Arg or Ser or Thr or Trp or Tyr or Val
  MISC_FEATURE (8)..(8): Xaa= Ala or Arg or Asn or Asp or Gln or Glu or Gly or His or Lys or Met or Pro or Ser or Thr or Tyr
XQXXXXPXT

SEQ ID NO: 561 - protein, 10 aa, Artificial Sequence
  Synthetic
  MISC_FEATURE (2)..(2): Xaa= Tyr or Phe
  MISC_FEATURE (3)..(3): Xaa= Thr or Ser
  MISC_FEATURE (4)..(4): Xaa= Ile or Leu or Met or Phe
  MISC_FEATURE (5)..(5): Xaa= Ala or Arg or Asn or Asp or Cys or Gln or Glu or His or Ile or Leu or Lys or Met or Pro or Ser or Thr or Trp or Tyr or Val
  MISC_FEATURE (6)..(6): Xaa= Asn or Asp or Gln or Glu or Lys or Pro or Ser or Thr
  MISC_FEATURE (7)..(7): Xaa= Ala or Arg or Asn or Asp or Cys or Gln or Glu or Gly or His or Ile or Leu or Lys or Met or Phe or Pro or Ser or Thr or Tyr or Val
  MISC_FEATURE (8)..(8): Xaa= Ala or Arg or Asn or Asp or Cys or Gln or Glu or Gly or His or Ile or Leu or Lys or Met or Phe or Pro or Ser or Thr or Tyr or Val
  MISC_FEATURE (9)..(9): Xaa= Ala or Arg or Cys or Gln or Glu or His or Ile or Leu or Lys or Met or Phe or Ser or Thr or Trp or Tyr or Val
GXXXXXXXXN

SEQ ID NO: 562 - protein, 17 aa, Artificial Sequence
  Synthetic
  MISC_FEATURE (1)..(1): Xaa= Phe or Leu or Ile or Met or Val or Ser or Pro or Thr or Ala or Tyr or His or Gln or Asn or Lys or Asp or Glu or Cys or Trp or Arg or Gly
  MISC_FEATURE (2)..(2): Xaa= Ile or Leu or Met or Phe or Val
  MISC_FEATURE (3)..(3): Xaa= Phe or Leu or Ile or Met or Val or Ser or Pro or Thr or Ala or Tyr or His or Gln or Asn or Lys or Asp or Glu or Cys or Trp or Arg or Gly
  MISC_FEATURE (4)..(4): Xaa= Pro or absent
  MISC_FEATURE (5)..(5): Xaa= Ala or Arg or Asn or Gln or Glu or His or Lys or Met or Ser or Thr or Tyr or Val
  MISC_FEATURE (6)..(6): Xaa= Ala or Arg or Asn or Asp or Cys or Gln or Glu or Gly or His or Lys or Met or Phe or Pro or Ser or Thr or Tyr or Val
  MISC_FEATURE (7)..(7): Xaa= Asn or Gly or Ser
  MISC_FEATURE (8)..(8): Xaa= Asn or Gly or Ser
  MISC_FEATURE (10)..(10): Xaa= Ala or Arg or Asn or Gln or Glu or His or Lys or Met or Ser or Thr or Tyr
  MISC_FEATURE (11)..(11): Xaa= Ala or Arg or Asn or Cys or Gln or Glu or His or Ile or Leu or Lys or Met or Phe or Ser or Thr or Trp or Tyr or Val
  MISC_FEATURE (13)..(13): Xaa= Ala or Asp or Gln or Glu or Lys or Pro or Ser or Thr
  MISC_FEATURE (14)..(14): Xaa= Ala or Arg or Asn or Asp or Cys or Gln or Glu or Gly or His or Ile or Leu or Lys or Met or Phe or Pro or Ser or Thr or Tyr or Val
  MISC_FEATURE (15)..(15): Xaa= Ile or Leu or Met or Phe
  MISC_FEATURE (17)..(17): Xaa= Ala or Gly or Ser
XXXXXXXXTXXNXXXKX

SEQ ID NO: 563 - protein, 8 aa, Artificial Sequence
  Synthetic
  MISC_FEATURE (1)..(1): Xaa= Ala or Arg or Asn or Gln or Glu or His or Lys or Met or Ser or Thr or Tyr
  MISC_FEATURE (2)..(2): Xaa= Ala or Arg or Asn or Asp or Cys or Gln or Glu or Gly or His or Lys or Met or Phe or Pro or Ser or Thr or Tyr or Val
  MISC_FEATURE (3)..(3): Xaa= Gln or Gly pr His or Thr or Trp
  MISC_FEATURE (4)..(4): Xaa= Phe or Leu or Ile or Met or Val or Ser or Pro or Thr or Ala or Tyr or His or Gln or Asn or Lys or Asp or Glu or Cys or Trp or Arg or Gly
  MISC_FEATURE (5)..(5): Xaa= Phe or Leu or Ile or Met or Val or Ser or Pro or Thr or Ala or Tyr or His or Gln or Asn or Lys or Asp or Glu or Cys or Trp or Arg or Gly
  MISC_FEATURE (6)..(6): Xaa= Phe or Leu or Ile or Met or Val or Ser or Pro or Thr or Ala or Tyr or His or Gln or Asn or Lys or Asp or Glu or Cys or Trp or Arg or Gly
  MISC_FEATURE (7)..(7): Xaa= Phe or Leu or Ile or Met or Val or Ser or Pro or Thr or Ala or Tyr or His or Gln or Asn or Lys or Asp or Glu or Cys or Trp or Arg or Gly
  MISC_FEATURE (8)..(8): Xaa= Phe or Tyr
XXXXXXXX

SEQ ID NO: 564 - protein, 10 aa, Artificial Sequence
  Synthetic
RASSSVSYIY

SEQ ID NO: 565 - protein, 7 aa, Artificial Sequence
  Synthetic
ATFNLAS

SEQ ID NO: 566 - protein, 9 aa, Artificial Sequence
  Synthetic
HQRSSYPWT

SEQ ID NO: 567 - protein, 10 aa, Artificial Sequence
  Synthetic
GYTFPDYYMN

SEQ ID NO: 568 - protein, 17 aa, Artificial Sequence
  Synthetic
DIDPNYGGTTYNQKFKG

SEQ ID NO: 569 - protein, 10 aa, Artificial Sequence
  Synthetic
SASSSIRYMH

SEQ ID NO: 570 - protein, 7 aa, Artificial Sequence
  Synthetic
DTSKLTS

SEQ ID NO: 571 - protein, 9 aa, Artificial Sequence
  Synthetic
QQDSSYPLT

SEQ ID NO: 572 - protein, 10 aa, Artificial Sequence
  Synthetic
GYTFTSYDIN

SEQ ID NO: 573 - protein, 17 aa, Artificial Sequence
  Synthetic
WIFPRDNNTKYNENFKG

SEQ ID NO: 574 - protein, 7 aa, Artificial Sequence
  Synthetic
ENWVGDF

SEQ ID NO: 575 - protein, 11 aa, Artificial Sequence
  Synthetic
KASQDVGTAVA

SEQ ID NO: 576 - protein, 7 aa, Artificial Sequence
  Synthetic
WASTRHT

SEQ ID NO: 577 - protein, 9 aa, Artificial Sequence
  Synthetic
QQYYGYPLT

SEQ ID NO: 578 - protein, 10 aa, Artificial Sequence
  Synthetic
GYSITSDYWN

SEQ ID NO: 579 - protein, 16 aa, Artificial Sequence
  Synthetic
YISYTGSTYYNPSLKS

SEQ ID NO: 580 - protein, 8 aa, Artificial Sequence
  Synthetic
YGGWLSPF

SEQ ID NO: 581 - protein, 16 aa, Artificial Sequence
  Synthetic
KSSQSLLYSSNQKNSL

SEQ ID NO: 582 - protein, 10 aa, Artificial Sequence
  Synthetic
GYSIISDYWN

SEQ ID NO: 583 - protein, 8 aa, Artificial Sequence
  Synthetic
RGGWLLPF

SEQ ID NO: 584 - protein, 10 aa, Artificial Sequence
  Synthetic
GFSLTTYSIN

SEQ ID NO: 585 - protein, 16 aa, Artificial Sequence
  Synthetic
VMWAGGGTNSNSVLKS

SEQ ID NO: 586 - protein, 10 aa, Artificial Sequence
  Synthetic
YYGNSPYYAI

SEQ ID NO: 587 - protein, 13 aa, Artificial Sequence
  Synthetic
TRSSGSIGSNYVQ

SEQ ID NO: 588 - protein, 7 aa, Artificial Sequence
  Synthetic
EDNQRPS

SEQ ID NO: 589 - protein, 9 aa, Artificial Sequence
  Synthetic
QSYDSSTWV

SEQ ID NO: 590 - protein, 17 aa, Artificial Sequence
  Synthetic
WISPIGGSTNYAQKVQG

SEQ ID NO: 591 - protein, 19 aa, Artificial Sequence
  Synthetic
  MISC_FEATURE (3)..(3): Xaa= Phe or Leu or Ile or Met or Val or Ser or Pro or Thr or Ala or Tyr or His or Gln or Asn or Lys or Asp or Glu or Cys or Trp or Arg or Gly
  MISC_FEATURE (4)..(4): Xaa= Phe or Leu or Ile or Met or Val or Ser or Pro or Thr or Ala or Tyr or His or Gln or Asn or Lys or Asp or Glu or Cys or Trp or Arg or Gly
  MISC_FEATURE (5)..(5): Xaa= Phe or Leu or Ile or Met or Val or Ser or Pro or Thr or Ala or Tyr or His or Gln or Asn or Lys or Asp or Glu or Cys or Trp or Arg or Gly
  MISC_FEATURE (6)..(6): Xaa= Phe or Leu or Ile or Met or Val or Ser or Pro or Thr or Ala or Tyr or His or Gln or Asn or Lys or Asp or Glu or Cys or Trp or Arg or Gly
  MISC_FEATURE (7)..(7): Xaa= Phe or Leu or Ile or Met or Val or Ser or Pro or Thr or Ala or Tyr or His or Gln or Asn or Lys or Asp or Glu or Cys or Trp or Arg or Gly
  MISC_FEATURE (8)..(8): Xaa= Phe or Leu or Ile or Met or Val or Ser or Pro or Thr or Ala or Tyr or His or Gln or Asn or Lys or Asp or Glu or Cys or Trp or Arg or Gly
  MISC_FEATURE (9)..(9): Xaa= Phe or Leu or Ile or Met or Val or Ser or Pro or Thr or Ala or Tyr or His or Gln or Asn or Lys or Asp or Glu or Cys or Trp or Arg or Gly
  MISC_FEATURE (10)..(10): Xaa= Phe or Leu or Ile or Met or Val or Ser or Pro or Thr or Ala or Tyr or His or Gln or Asn or Lys or Asp or Glu or Cys or Trp or Arg or Gly
  MISC_FEATURE (11)..(11): Xaa= Phe or Leu or Ile or Met or Val or Ser or Pro or Thr or Ala or Tyr or His or Gln or Asn or Lys or Asp or Glu or Cys or Trp or Arg or Gly
  MISC_FEATURE (12)..(12): Xaa= Phe or Leu or Ile or Met or Val or Ser or Pro or Thr or Ala or Tyr or His or Gln or Asn or Lys or Asp or Glu or Cys or Trp or Arg or Gly
  MISC_FEATURE (13)..(13): Xaa= Phe or Leu or Ile or Met or Val or Ser or Pro or Thr or Ala or Tyr or His or Gln or Asn or Lys or Asp or Glu or Cys or Trp or Arg or Gly
  MISC_FEATURE (14)..(14): Xaa= Phe or Leu or Ile or Met or Val or Ser or Pro or Thr or Ala or Tyr or His or Gln or Asn or Lys or Asp or Glu or Cys or Trp or Arg or Gly
  MISC_FEATURE (15)..(15): Xaa= Phe or Leu or Ile or Met or Val or Ser or Pro or Thr or Ala or Tyr or His or Gln or Asn or Lys or Asp or Glu or Cys or Trp or Arg or Gly
  MISC_FEATURE (16)..(16): Xaa= Phe or Leu or Ile or Met or Val or Ser or Pro or Thr or Ala or Tyr or His or Gln or Asn or Lys or Asp or Glu or Cys or Trp or Arg or Gly
  MISC_FEATURE (17)..(17): Xaa= Phe or Leu or Ile or Met or Val or Ser or Pro or Thr or Ala or Tyr or His or Gln or Asn or Lys or Asp or Glu or Cys or Trp or Arg or Gly
GLXXXXXXXXXXXXXXXDV

SEQ ID NO: 592 - protein, 13 aa, Artificial Sequence
  Synthetic
TRSSGNIASNYVQ

SEQ ID NO: 593 - protein, 7 aa, Artificial Sequence
  Synthetic
GKNNRPS

SEQ ID NO: 594 - protein, 10 aa, Artificial Sequence
  Synthetic
QSYDSSNLWV

SEQ ID NO: 595 - protein, 5 aa, Artificial Sequence
  Synthetic
SYGIS

SEQ ID NO: 596 - protein, 17 aa, Artificial Sequence
  Synthetic
WISAYNGNTNYAQKLED

SEQ ID NO: 597 - protein, 15 aa, Artificial Sequence
  Synthetic
ALPSGTILVGGWFDP

SEQ ID NO: 598 - protein, 11 aa, Artificial Sequence
  Synthetic
QGDSLRSYYAS

SEQ ID NO: 599 - protein, 7 aa, Artificial Sequence
  Synthetic
SDRDRPS

SEQ ID NO: 600 - protein, 11 aa, Artificial Sequence
  Synthetic
NSRDSSGNHYV

SEQ ID NO: 601 - protein, 5 aa, Artificial Sequence
  Synthetic
SYALS

SEQ ID NO: 602 - protein, 17 aa, Artificial Sequence
  Synthetic
AISGGGGSTYYADSVKD

SEQ ID NO: 603 - protein, 15 aa, Artificial Sequence
  Synthetic
DVFPETFSMNYGMDV

SEQ ID NO: 604 - protein, 11 aa, Artificial Sequence
  Synthetic
GGSDIGRKSVH

SEQ ID NO: 605 - protein, 11 aa, Artificial Sequence
  Synthetic
QVWDNNSDHYV

SEQ ID NO: 606 - protein, 5 aa, Artificial Sequence
  Synthetic
DYAMH

SEQ ID NO: 607 - protein, 17 aa, Artificial Sequence
  Synthetic
LISGDGGSTYYADSVKD

SEQ ID NO: 608 - protein, 19 aa, Artificial Sequence
  Synthetic
VLLPCSSTSCYGSVGAFDI

SEQ ID NO: 609 - protein, 9 aa, Artificial Sequence
  Synthetic
SSYTSSTLP

SEQ ID NO: 610 - protein, 5 aa, Artificial Sequence
  Synthetic
NYDMS

SEQ ID NO: 611 - protein, 17 aa, Artificial Sequence
  Synthetic
RVNWNGGSTTYADAVKD

SEQ ID NO: 612 - protein, 8 aa, Artificial Sequence
  Synthetic
EFVGAYDL

SEQ ID NO: 613 - protein, 11 aa, Artificial Sequence
  Synthetic
RASQSIGNSLA

SEQ ID NO: 614 - protein, 7 aa, Artificial Sequence
  Synthetic
AASTLQS

SEQ ID NO: 615 - protein, 9 aa, Artificial Sequence
  Synthetic
QQHTIPTFS

SEQ ID NO: 616 - protein, 5 aa, Artificial Sequence
  Synthetic
GLYIH

SEQ ID NO: 617 - protein, 17 aa, Artificial Sequence
  Synthetic
WIIPIFGTANYAQKFED

SEQ ID NO: 618 - protein, 12 aa, Artificial Sequence
  Synthetic
GLRWGIWGWFDP

SEQ ID NO: 619 - protein, 11 aa, Artificial Sequence
  Synthetic
RASQGIGSYLA

SEQ ID NO: 620 - protein, 7 aa, Artificial Sequence
  Synthetic
QDIKRPS

SEQ ID NO: 621 - protein, 9 aa, Artificial Sequence
  Synthetic
QQLNNYPIT

SEQ ID NO: 622 - protein, 5 aa, Artificial Sequence
  Synthetic
DNAIS

SEQ ID NO: 623 - protein, 17 aa, Artificial Sequence
  Synthetic
WIIPIFGKPNYAQKFED

SEQ ID NO: 624 - protein, 12 aa, Artificial Sequence
  Synthetic
TMVRGFLGVMDV

SEQ ID NO: 625 - protein, 11 aa, Artificial Sequence
  Synthetic
SGDKLGNKYAY

SEQ ID NO: 626 - protein, 7 aa, Artificial Sequence
  Synthetic
EDYRRPS

SEQ ID NO: 627 - protein, 8 aa, Artificial Sequence
  Synthetic
QTWDNSVV

SEQ ID NO: 628 - protein, 17 aa, Artificial Sequence
  Synthetic
AISGSGGSTYYADSVKD

SEQ ID NO: 629 - protein, 16 aa, Artificial Sequence
  Synthetic
DQFVTIFGVPRYGMDV

SEQ ID NO: 630 - protein, 13 aa, Artificial Sequence
  Synthetic
TRSSGSIDSNYVQ

SEQ ID NO: 631 - protein, 7 aa, Artificial Sequence
  Synthetic
DDSDRPS

SEQ ID NO: 632 - protein, 11 aa, Artificial Sequence
  Synthetic
QSYDSNNRHVI

SEQ ID NO: 633 - protein, 5 aa, Artificial Sequence
  Synthetic
TYALN

SEQ ID NO: 634 - protein, 17 aa, Artificial Sequence
  Synthetic
RIVPLIGLVNYAHNFED

SEQ ID NO: 635 - protein, 11 aa, Artificial Sequence
  Synthetic
GRQMFGAGIDF

SEQ ID NO: 636 - protein, 13 aa, Artificial Sequence
  Synthetic
TRSSGNIGTNYVQ

SEQ ID NO: 637 - protein, 7 aa, Artificial Sequence
  Synthetic
EDNKRPS

SEQ ID NO: 638 - protein, 9 aa, Artificial Sequence
  Synthetic
QSYHSSGWE

SEQ ID NO: 639 - protein, 5 aa, Artificial Sequence
  Synthetic
SHGIT

SEQ ID NO: 640 - protein, 17 aa, Artificial Sequence
  Synthetic
WISAHNGHASNAQKVED

SEQ ID NO: 641 - protein, 9 aa, Artificial Sequence
  Synthetic
EVYGGNSDY

SEQ ID NO: 642 - protein, 11 aa, Artificial Sequence
  Synthetic
GGNNIGSKGVH

SEQ ID NO: 643 - protein, 11 aa, Artificial Sequence
  Synthetic
YKSDSNKQQAS

SEQ ID NO: 644 - protein, 11 aa, Artificial Sequence
  Synthetic
QVWDSSSDHWV

SEQ ID NO: 645 - protein, 5 aa, Artificial Sequence
  Synthetic
RHGMH

SEQ ID NO: 646 - protein, 17 aa, Artificial Sequence
  Synthetic
VISHDGSVKYYADSMKD

SEQ ID NO: 647 - protein, 11 aa, Artificial Sequence
  Synthetic
VHAALYYGMDV

SEQ ID NO: 648 - protein, 13 aa, Artificial Sequence
  Synthetic
TRSSGSIASNYVQ

SEQ ID NO: 649 - protein, 10 aa, Artificial Sequence
  Synthetic
QSYDSTTPSV

SEQ ID NO: 650 - protein, 17 aa, Artificial Sequence
  Synthetic
WTSPHNGLTAFAQILED

SEQ ID NO: 651 - protein, 12 aa, Artificial Sequence
  Synthetic
GLSYQVSGWFDP

SEQ ID NO: 652 - protein, 13 aa, Artificial Sequence
  Synthetic
TRSSGSIASHYVQ

SEQ ID NO: 653 - protein, 9 aa, Artificial Sequence
  Synthetic
QSYDGITVI

SEQ ID NO: 654 - protein, 17 aa, Artificial Sequence
  Synthetic
RIIPILGIANYAQKFED

SEQ ID NO: 655 - protein, 11 aa, Artificial Sequence
  Synthetic
VHPVFSYALDV

SEQ ID NO: 656 - protein, 14 aa, Artificial Sequence
  Synthetic
TLRSGLNVGSYRIY

SEQ ID NO: 657 - protein, 10 aa, Artificial Sequence
  Synthetic
QSYDSSNRWV

SEQ ID NO: 658 - protein, 5 aa, Artificial Sequence
  Synthetic
TYAFS

SEQ ID NO: 659 - protein, 17 aa, Artificial Sequence
  Synthetic
WISAYNGNTNYAQKVED

SEQ ID NO: 660 - protein, 9 aa, Artificial Sequence
  Synthetic
DGYGSDPVL

SEQ ID NO: 661 - protein, 9 aa, Artificial Sequence
  Synthetic
MIWYSSAVV

SEQ ID NO: 662 - protein, 5 aa, Artificial Sequence
  Synthetic
NYGIS

SEQ ID NO: 663 - protein, 9 aa, Artificial Sequence
  Synthetic
GDFRKPFDY

SEQ ID NO: 664 - protein, 15 aa, Artificial Sequence
  Synthetic
RATESVEYYGTSLVQ

SEQ ID NO: 665 - protein, 7 aa, Artificial Sequence
  Synthetic
AASSVDS

SEQ ID NO: 666 - protein, 9 aa, Artificial Sequence
  Synthetic
QQSRRVPYT

SEQ ID NO: 667 - protein, 5 aa, Artificial Sequence
  Synthetic
SYVMH

SEQ ID NO: 668 - protein, 17 aa, Artificial Sequence
  Synthetic
YVNPFNDGTKYNEMFKG

SEQ ID NO: 669 - protein, 6 aa, Artificial Sequence
  Synthetic
QAWGYP

SEQ ID NO: 670 - protein, 6 aa, Artificial Sequence
  Synthetic
QSISNW

SEQ ID NO: 671 - protein, 9 aa, Artificial Sequence
  Synthetic
QQYHSYSYT

SEQ ID NO: 672 - protein, 8 aa, Artificial Sequence
  Synthetic
GFTFSRFW

SEQ ID NO: 673 - protein, 8 aa, Artificial Sequence
  Synthetic
INQDGTEK

SEQ ID NO: 674 - protein, 14 aa, Artificial Sequence
  Synthetic
ANTYYDFWSGHFDY

SEQ ID NO: 675 - protein, 6 aa, Artificial Sequence
  Synthetic
QGIRND

SEQ ID NO: 676 - protein, 9 aa, Artificial Sequence
  Synthetic
LQHNSYPLT

SEQ ID NO: 677 - protein, 8 aa, Artificial Sequence
  Synthetic
GFTFSNFG

SEQ ID NO: 678 - protein, 8 aa, Artificial Sequence
  Synthetic
LWSDGSNK

SEQ ID NO: 679 - protein, 14 aa, Artificial Sequence
  Synthetic
ARGRGAPGIPIFGY

SEQ ID NO: 680 - protein, 9 aa, Artificial Sequence
  Synthetic
LQHNNYPYT

SEQ ID NO: 681 - protein, 8 aa, Artificial Sequence
  Synthetic
GFTFSNAW

SEQ ID NO: 682 - protein, 10 aa, Artificial Sequence
  Synthetic
IKRKTDGGTT

SEQ ID NO: 683 - protein, 21 aa, Artificial Sequence
  Synthetic
TTDDIVVVPAVMREYYFGMDV

SEQ ID NO: 684 - protein, 11 aa, Artificial Sequence
  Synthetic
QTLVHGDGNTY

SEQ ID NO: 685 - protein, 9 aa, Artificial Sequence
  Synthetic
MQATHFPIT

SEQ ID NO: 686 - protein, 8 aa, Artificial Sequence
  Synthetic
GYSFTGYY

SEQ ID NO: 687 - protein, 8 aa, Artificial Sequence
  Synthetic
INPNSGTK

SEQ ID NO: 688 - protein, 14 aa, Artificial Sequence
  Synthetic
ARDEDWNFGSWFDS

SEQ ID NO: 689 - protein, 11 aa, Artificial Sequence
  Synthetic
PSLVHSDGNTY

SEQ ID NO: 690 - protein, 8 aa, Artificial Sequence
  Synthetic
GYTFTGYY

SEQ ID NO: 691 - protein, 8 aa, Artificial Sequence
  Synthetic
LNPNTGTT

SEQ ID NO: 692 - protein, 14 aa, Artificial Sequence
  Synthetic
ARDEDWNYGSWFDT

SEQ ID NO: 693 - protein, 6 aa, Artificial Sequence
  Synthetic
QSINSY

SEQ ID NO: 694 - protein, 10 aa, Artificial Sequence
  Synthetic
QQSYSTPPIT

SEQ ID NO: 695 - protein, 8 aa, Artificial Sequence
  Synthetic
GFTFDDYG

SEQ ID NO: 696 - protein, 8 aa, Artificial Sequence
  Synthetic
IHWHGKRT

SEQ ID NO: 697 - protein, 13 aa, Artificial Sequence
  Synthetic
VRGGMSTGDWFDP

SEQ ID NO: 698 - protein, 6 aa, Artificial Sequence
  Synthetic
QSISSY

SEQ ID NO: 699 - protein, 8 aa, Artificial Sequence
  Synthetic
IHWSGRST

SEQ ID NO: 700 - protein, 13 aa, Artificial Sequence
  Synthetic
ARGGMSTGDWFDP

SEQ ID NO: 701 - protein, 6 aa, Artificial Sequence
  Synthetic
QTINIY

SEQ ID NO: 702 - protein, 10 aa, Artificial Sequence
  Synthetic
HQSYSTPPIT

SEQ ID NO: 703 - protein, 8 aa, Artificial Sequence
  Synthetic
GFTVGSNY

SEQ ID NO: 704 - protein, 7 aa, Artificial Sequence
  Synthetic
IYSGGST

SEQ ID NO: 705 - protein, 9 aa, Artificial Sequence
  Synthetic
ARGIRGLDV

SEQ ID NO: 706 - protein, 7 aa, Artificial Sequence
  Synthetic
QSFNFNY

SEQ ID NO: 707 - protein, 9 aa, Artificial Sequence
  Synthetic
QQYESAPWT

SEQ ID NO: 708 - protein, 8 aa, Artificial Sequence
  Synthetic
GGIFSSST

SEQ ID NO: 709 - protein, 8 aa, Artificial Sequence
  Synthetic
IIPVFGTV

SEQ ID NO: 710 - protein, 11 aa, Artificial Sequence
  Synthetic
ARNWGLGSFYI

SEQ ID NO: 711 - protein, 10 aa, Artificial Sequence
  Synthetic
QQSYCTPPIT

SEQ ID NO: 712 - protein, 8 aa, Artificial Sequence
  Synthetic
GFPFDEYA

SEQ ID NO: 713 - protein, 8 aa, Artificial Sequence
  Synthetic
ISWSNNNI

SEQ ID NO: 714 - protein, 8 aa, Artificial Sequence
  Synthetic
AKSGIFDS

SEQ ID NO: 715 - protein, 8 aa, Artificial Sequence
  Synthetic
GFTFSSYG

SEQ ID NO: 716 - protein, 8 aa, Artificial Sequence
  Synthetic
ISYEGRNK

SEQ ID NO: 717 - protein, 11 aa, Artificial Sequence
  Synthetic
AKDRTLYGMDV

SEQ ID NO: 718 - protein, 6 aa, Artificial Sequence
  Synthetic
QVISNY

SEQ ID NO: 719 - protein, 9 aa, Artificial Sequence
  Synthetic
QKYNSAPRT

SEQ ID NO: 720 - protein, 10 aa, Artificial Sequence
  Synthetic
GFSLSTNRMC

SEQ ID NO: 721 - protein, 7 aa, Artificial Sequence
  Synthetic
IDWDGVK

SEQ ID NO: 722 - protein, 13 aa, Artificial Sequence
  Synthetic
ARSTSLTFYYFDY

SEQ ID NO: 723 - protein, 6 aa, Artificial Sequence
  Synthetic
QNINNY

SEQ ID NO: 724 - protein, 9 aa, Artificial Sequence
  Synthetic
QQSYNTPLT

SEQ ID NO: 725 - protein, 8 aa, Artificial Sequence
  Synthetic
EFTVGTNH

SEQ ID NO: 726 - protein, 7 aa, Artificial Sequence
  Synthetic
IYSGGNT

SEQ ID NO: 727 - protein, 9 aa, Artificial Sequence
  Synthetic
ARGLGGMDV

SEQ ID NO: 728 - protein, 6 aa, Artificial Sequence
  Synthetic
QTISTY

SEQ ID NO: 729 - protein, 9 aa, Artificial Sequence
  Synthetic
LQHNSYPYT

SEQ ID NO: 730 - protein, 8 aa, Artificial Sequence
  Synthetic
GFTFSKYW

SEQ ID NO: 731 - protein, 8 aa, Artificial Sequence
  Synthetic
IKGDGSEK

SEQ ID NO: 732 - protein, 13 aa, Artificial Sequence
  Synthetic
ARDYWGSGYYFDF

SEQ ID NO: 733 - protein, 9 aa, Artificial Sequence
  Synthetic
QQSYSTPFT

SEQ ID NO: 734 - protein, 8 aa, Artificial Sequence
  Synthetic
GFTFSSYW

SEQ ID NO: 735 - protein, 8 aa, Artificial Sequence
  Synthetic
IKQDGSEK

SEQ ID NO: 736 - protein, 23 aa, Artificial Sequence
  Synthetic
ARDDIVVVPAPMGYYYYYFGMDV

SEQ ID NO: 737 - protein, 8 aa, Artificial Sequence
  Synthetic
GFTFDDFA

SEQ ID NO: 738 - protein, 8 aa, Artificial Sequence
  Synthetic
ISWTGGNM

SEQ ID NO: 739 - protein, 16 aa, Artificial Sequence
  Synthetic
VKDIRGIVATGGAFDI

SEQ ID NO: 740 - protein, 8 aa, Artificial Sequence
  Synthetic
GFTVGTNY

SEQ ID NO: 741 - protein, 9 aa, Artificial Sequence
  Synthetic
ARGIRGFDI

SEQ ID NO: 742 - protein, 8 aa, Artificial Sequence
  Synthetic
GFTISTNY

SEQ ID NO: 743 - protein, 7 aa, Artificial Sequence
  Synthetic
IYSSGST

SEQ ID NO: 744 - protein, 8 aa, Artificial Sequence
  Synthetic
GFTIDDSA

SEQ ID NO: 745 - protein, 8 aa, Artificial Sequence
  Synthetic
ISWKSGSI

SEQ ID NO: 746 - protein, 17 aa, Artificial Sequence
  Synthetic
VKDIRGNWNYGGNWFDP

SEQ ID NO: 747 - protein, 8 aa, Artificial Sequence
  Synthetic
GFTVGVNH

SEQ ID NO: 748 - protein, 7 aa, Artificial Sequence
  Synthetic
IFSSGRT

SEQ ID NO: 749 - protein, 9 aa, Artificial Sequence
  Synthetic
ARGIGGLDI

SEQ ID NO: 750 - protein, 8 aa, Artificial Sequence
  Synthetic
GFTFDDYA

SEQ ID NO: 751 - protein, 8 aa, Artificial Sequence
  Synthetic
ISWTGGTI

SEQ ID NO: 752 - protein, 16 aa, Artificial Sequence
  Synthetic
TRDIRGNWKYGGWFDP

SEQ ID NO: 753 - protein, 8 aa, Artificial Sequence
  Synthetic
GYTFTAYY

SEQ ID NO: 754 - protein, 8 aa, Artificial Sequence
  Synthetic
ISPNSGFT

SEQ ID NO: 755 - protein, 13 aa, Artificial Sequence
  Synthetic
AREGSTHHNSFDP

SEQ ID NO: 756 - protein, 8 aa, Artificial Sequence
  Synthetic
GFTVGTNF

SEQ ID NO: 757 - protein, 8 aa, Artificial Sequence
  Synthetic
IIPILGAA

SEQ ID NO: 758 - protein, 8 aa, Artificial Sequence
  Synthetic
ARGGGMDV

SEQ ID NO: 759 - protein, 8 aa, Artificial Sequence
  Synthetic
GGTFNTYV

SEQ ID NO: 760 - protein, 8 aa, Artificial Sequence
  Synthetic
ISPYNGYT

SEQ ID NO: 761 - protein, 11 aa, Artificial Sequence
  Synthetic
ARDRTSGGFDP

SEQ ID NO: 762 - protein, 8 aa, Artificial Sequence
  Synthetic
GYIFTHYG

SEQ ID NO: 763 - protein, 12 aa, Artificial Sequence
  Synthetic
SRGRGPYWSFDL

SEQ ID NO: 764 - protein, 13 aa, Artificial Sequence
  Synthetic
QASESVYSNNYLS

SEQ ID NO: 765 - protein, 7 aa, Artificial Sequence
  Synthetic
LASTLAS

SEQ ID NO: 766 - protein, 12 aa, Artificial Sequence
  Synthetic
IGGKSSSTDGNA

SEQ ID NO: 767 - protein, 5 aa, Artificial Sequence
  Synthetic
SNGLT

SEQ ID NO: 768 - protein, 16 aa, Artificial Sequence
  Synthetic
TINKDASAYYASWAKG

SEQ ID NO: 769 - protein, 9 aa, Artificial Sequence
  Synthetic
IAFKTGTSI

SEQ ID NO: 770 - protein, 16 aa, Artificial Sequence
  Synthetic
RSSKSLLHSNGITYLY

SEQ ID NO: 771 - protein, 7 aa, Artificial Sequence
  Synthetic
QMSNLAS

SEQ ID NO: 772 - protein, 9 aa, Artificial Sequence
  Synthetic
AQNLEPPLT

SEQ ID NO: 773 - protein, 5 aa, Artificial Sequence
  Synthetic
DYYTH

SEQ ID NO: 774 - protein, 17 aa, Artificial Sequence
  Synthetic
WIDPENGKTAYAPKFQG

SEQ ID NO: 775 - protein, 10 aa, Artificial Sequence
  Synthetic
GGYDVYFLDY

SEQ ID NO: 776 - protein, 11 aa, Artificial Sequence
  Synthetic
KASQDVGIVVA

SEQ ID NO: 777 - protein, 7 aa, Artificial Sequence
  Synthetic
WASIRHT

SEQ ID NO: 778 - protein, 10 aa, Artificial Sequence
  Synthetic
QQYSNYPLYT

SEQ ID NO: 779 - protein, 10 aa, Artificial Sequence
  Synthetic
GFSLTSYGVH

SEQ ID NO: 780 - protein, 16 aa, Artificial Sequence
  Synthetic
VIWAGGSTNYNSALMS

SEQ ID NO: 781 - protein, 11 aa, Artificial Sequence
  Synthetic
AKPYGNSAMDY

SEQ ID NO: 782 - protein, 16 aa, Artificial Sequence
  Synthetic
VIWAGGSTNYVDSVKG

SEQ ID NO: 783 - protein, 11 aa, Artificial Sequence
  Synthetic
AKPYGTSAMDY

SEQ ID NO: 784 - protein, 16 aa, Artificial Sequence
  Synthetic
VIWAGGSTNYADSVKG

SEQ ID NO: 785 - protein, 14 aa, Artificial Sequence
  Synthetic
ASQSVSTSSSSFMH

SEQ ID NO: 786 - protein, 7 aa, Artificial Sequence
  Synthetic
YASNLES

SEQ ID NO: 787 - protein, 9 aa, Artificial Sequence
  Synthetic
QHSWEIPYT

SEQ ID NO: 788 - protein, 5 aa, Artificial Sequence
  Synthetic
SYGMS

SEQ ID NO: 789 - protein, 16 aa, Artificial Sequence
  Synthetic
SISSGGSTYYPDSVKG

SEQ ID NO: 790 - protein, 8 aa, Artificial Sequence
  Synthetic
GYDSGFAY

SEQ ID NO: 791 - protein, 15 aa, Artificial Sequence
  Synthetic
RASQSVSTSSSSYMH

SEQ ID NO: 792 - protein, 16 aa, Artificial Sequence
  Synthetic
SISSGGTTYYPDSVKG

SEQ ID NO: 793 - protein, 11 aa, Artificial Sequence
  Synthetic
KASQSVSNDVA

SEQ ID NO: 794 - protein, 7 aa, Artificial Sequence
  Synthetic
YAANRYT

SEQ ID NO: 795 - protein, 9 aa, Artificial Sequence
  Synthetic
QQDYTSPYT

SEQ ID NO: 796 - protein, 5 aa, Artificial Sequence
  Synthetic
TYGVH

SEQ ID NO: 797 - protein, 17 aa, Artificial Sequence
  Synthetic
VIWRGVTTDYNAAFMAS

SEQ ID NO: 798 - protein, 8 aa, Artificial Sequence
  Synthetic
LGFYAMDY

SEQ ID NO: 799 - protein, 11 aa, Artificial Sequence
  Synthetic
KASQSVSNDVG

SEQ ID NO: 800 - protein, 7 aa, Artificial Sequence
  Synthetic
YASNRYS

SEQ ID NO: 801 - protein, 5 aa, Artificial Sequence
  Synthetic
SYGVH

SEQ ID NO: 802 - protein, 16 aa, Artificial Sequence
  Synthetic
VIWSGGVTDYNAAFIS

SEQ ID NO: 803 - protein, 16 aa, Artificial Sequence
  Synthetic
RSSQIIVHSNANTYLE

SEQ ID NO: 804 - protein, 7 aa, Artificial Sequence
  Synthetic
KVSNRFS

SEQ ID NO: 805 - protein, 9 aa, Artificial Sequence
  Synthetic
FQGSHVPYT

SEQ ID NO: 806 - protein, 5 aa, Artificial Sequence
  Synthetic
TYWMH

SEQ ID NO: 807 - protein, 17 aa, Artificial Sequence
  Synthetic
QINPDSTTINTAPSLKD

SEQ ID NO: 808 - protein, 10 aa, Artificial Sequence
  Synthetic
PGDYGYDFDC

SEQ ID NO: 809 - protein, 12 aa, Artificial Sequence
  Synthetic
SASSSVSSSYLY

SEQ ID NO: 810 - protein, 7 aa, Artificial Sequence
  Synthetic
NTSNLAS

SEQ ID NO: 811 - protein, 9 aa, Artificial Sequence
  Synthetic
HQWRSYPPT

SEQ ID NO: 812 - protein, 5 aa, Artificial Sequence
  Synthetic
SGYWN

SEQ ID NO: 813 - protein, 16 aa, Artificial Sequence
  Synthetic
YISYSGSTYYNPSLKS

SEQ ID NO: 814 - protein, 11 aa, Artificial Sequence
  Synthetic
SLLWFSTGFAY

SEQ ID NO: 815 - protein, 10 aa, Artificial Sequence
  Synthetic
SANSSVSYMH

SEQ ID NO: 816 - protein, 7 aa, Artificial Sequence
  Synthetic
DTSKLAS

SEQ ID NO: 817 - protein, 9 aa, Artificial Sequence
  Synthetic
QQWSSNPWT

SEQ ID NO: 818 - protein, 16 aa, Artificial Sequence
  Synthetic
YIWSGGITDYNAAFKS

SEQ ID NO: 819 - protein, 15 aa, Artificial Sequence
  Synthetic
RASQSVSTSSYSYMH

SEQ ID NO: 820 - protein, 9 aa, Artificial Sequence
  Synthetic
QNSWEIPYT

SEQ ID NO: 821 - protein, 5 aa, Artificial Sequence
  Synthetic
STGMS

SEQ ID NO: 822 - protein, 16 aa, Artificial Sequence
  Synthetic
SISSGGTTYYLGSVQG

SEQ ID NO: 823 - protein, 8 aa, Artificial Sequence
  Synthetic
GYDAGFAY

SEQ ID NO: 824 - protein, 17 aa, Artificial Sequence
  Synthetic
KSSQSLLYSSNQKNSLA

SEQ ID NO: 825 - protein, 7 aa, Artificial Sequence
  Synthetic
WASNRES

SEQ ID NO: 826 - protein, 9 aa, Artificial Sequence
  Synthetic
QQYYSYPLT

SEQ ID NO: 827 - protein, 5 aa, Artificial Sequence
  Synthetic
SGYWT

SEQ ID NO: 828 - protein, 15 aa, Artificial Sequence
  Synthetic
YIYTGSTYYNPSLKS

SEQ ID NO: 829 - protein, 9 aa, Artificial Sequence
  Synthetic
QRDWLGFAY

SEQ ID NO: 830 - protein, 15 aa, Artificial Sequence
  Synthetic
RASQSVSTSSYSYVH

SEQ ID NO: 831 - protein, 16 aa, Artificial Sequence
  Synthetic
SISSGGSIYYPDSVKG

SEQ ID NO: 832 - protein, 8 aa, Artificial Sequence
  Synthetic
GYDAGFAF

SEQ ID NO: 833 - protein, 10 aa, Artificial Sequence
  Synthetic
GFTFSMYMMM

SEQ ID NO: 834 - protein, 10 aa, Artificial Sequence
  Synthetic
GFTFSAYAMA

SEQ ID NO: 835 - protein, 10 aa, Artificial Sequence
  Synthetic
GFTFSAYRMF

SEQ ID NO: 836 - protein, 10 aa, Artificial Sequence
  Synthetic
GFTFSAYLMV

SEQ ID NO: 837 - protein, 10 aa, Artificial Sequence
  Synthetic
GFTFSAYVMF

SEQ ID NO: 838 - protein, 10 aa, Artificial Sequence
  Synthetic
GFTFSAYVMS

SEQ ID NO: 839 - protein, 10 aa, Artificial Sequence
  Synthetic
GFTFSGYLMV

SEQ ID NO: 840 - protein, 10 aa, Artificial Sequence
  Synthetic
GFTFSGYQML

SEQ ID NO: 841 - protein, 10 aa, Artificial Sequence
  Synthetic
GFTFSGYSMF

SEQ ID NO: 842 - protein, 10 aa, Artificial Sequence
  Synthetic
GFTFSGYWMA

SEQ ID NO: 843 - protein, 10 aa, Artificial Sequence
  Synthetic
GFTFSQYLMY

SEQ ID NO: 844 - protein, 10 aa, Artificial Sequence
  Synthetic
GFTFSQYVMF

SEQ ID NO: 845 - protein, 10 aa, Artificial Sequence
  Synthetic
GFTFSQYYMY

SEQ ID NO: 846 - protein, 10 aa, Artificial Sequence
  Synthetic
GFTFSSYLMS

SEQ ID NO: 847 - protein, 10 aa, Artificial Sequence
  Synthetic
GFTFSSYLMT

SEQ ID NO: 848 - protein, 10 aa, Artificial Sequence
  Synthetic
GFTFSSYQMV

SEQ ID NO: 849 - protein, 10 aa, Artificial Sequence
  Synthetic
GFTFSSYSMA

SEQ ID NO: 850 - protein, 10 aa, Artificial Sequence
  Synthetic
GFTFSSYVMF

SEQ ID NO: 851 - protein, 10 aa, Artificial Sequence
  Synthetic
GFTFSSYVMS

SEQ ID NO: 852 - protein, 10 aa, Artificial Sequence
  Synthetic
GFTFSSYVMY

SEQ ID NO: 853 - protein, 10 aa, Artificial Sequence
  Synthetic
GFTFSSYYMF

SEQ ID NO: 854 - protein, 10 aa, Artificial Sequence
  Synthetic
GFTFSSYYMV

SEQ ID NO: 855 - protein, 10 aa, Artificial Sequence
  Synthetic
GFTFSYYSMV

SEQ ID NO: 856 - protein, 10 aa, Artificial Sequence
  Synthetic
GFTFSWYLMA

SEQ ID NO: 857 - protein, 10 aa, Artificial Sequence
  Synthetic
GFTFSWYQMS

SEQ ID NO: 858 - DNA, 534 bp, Artificial Sequence
  Synthetic
caaggtcagtctggatcctattgcgaggttagtgagctgtttgttcttccttggtgcatgggtggaggtggctcgagcggtggcagcggtggctctggtggtactagcacctctggtcgttccgctaacccacgtggcggcggttctgacatccagatgacccagagccccagcagcctgtctgctagcgtgggcgacagagtgaccatcacctgtagagccagccagagcatcagcagctacctgaactggtatcagcagaagcccggcaaggcccccaaactgctgatctacgccgccagctctctgcagtctggcgtgcccagcagattttccggcagcggctctggcaccgacttcaccctgaccatcagctccctgcagcccgaggacttcgccacctactactgccagcaggacaacggctaccccagcacctttggcggaggtaccaaggtggaaatcaagcgttgtgaggccactcacaagacatcaacttcacccattgtcaagagcttcaacaggaatgagtgt

SEQ ID NO: 859 - protein, 157 aa, Artificial Sequence
  Synthetic
QGQSGSYCEVSELFVLPWCMGGGGSSGGSGGSGGTSTSGRSANPRGGGSDIQMTQSPSSLSASVGDRVTITCRASQSISSYLNWYQQKPGKAPKLLIYAASSLQSGVPSRFSGSGSGTDFTLTISSLQPEDFATYYCQQDNGYPSTFGGGTKVEIKR

SEQ ID NO: 860 - DNA, 516 bp, Artificial Sequence
  Synthetic
tattgcgaggttagtgagctgtttgttcttccttggtgcatgggtggaggtggctcgagcggtggcagcggtggctctggtggtactagcacctctggtcgttccgctaacccacgtggcggcggttctgacatccagatgacccagagccccagcagcctgtctgctagcgtgggcgacagagtgaccatcacctgtagagccagccagagcatcagcagctacctgaactggtatcagcagaagcccggcaaggcccccaaactgctgatctacgccgccagctctctgcagtctggcgtgcccagcagattttccggcagcggctctggcaccgacttcaccctgaccatcagctccctgcagcccgaggacttcgccacctactactgccagcaggacaacggctaccccagcacctttggcggaggtaccaaggtggaaatcaagcgttgtgaggccactcacaagacatcaacttcacccattgtcaagagcttcaacaggaatgagtgt

SEQ ID NO: 861 - protein, 151 aa, Artificial Sequence
  Synthetic
YCEVSELFVLPWCMGGGGSSGGSGGSGGTSTSGRSANPRGGGSDIQMTQSPSSLSASVGDRVTITCRASQSISSYLNWYQQKPGKAPKLLIYAASSLQSGVPSRFSGSGSGTDFTLTISSLQPEDFATYYCQQDNGYPSTFGGGTKVEIKR

SEQ ID NO: 862 - DNA, 534 bp, Artificial Sequence
  Synthetic
caaggtcagtctggatcctcttgccttatgcatccgcattatgctcatgattattgctatgttggaggtggctcgagcggtggcagcggtggctctggtggtactagcacctctggtcgttccgctaacccacgtggcggcggttctgacatccagatgacccagagccccagcagcctgtctgctagcgtgggcgacagagtgaccatcacctgtagagccagccagagcatcagcagctacctgaactggtatcagcagaagcccggcaaggcccccaaactgctgatctacgccgccagctctctgcagtctggcgtgcccagcagattttccggcagcggctctggcaccgacttcaccctgaccatcagctccctgcagcccgaggacttcgccacctactactgccagcaggacaacggctaccccagcacctttggcggaggtaccaaggtggaaatcaagcgttgtgaggccactcacaagacatcaacttcacccattgtcaagagcttcaacaggaatgagtgt

SEQ ID NO: 863 - protein, 157 aa, Artificial Sequence
  Synthetic
QGQSGSSCLMHPHYAHDYCYVGGGSSGGSGGSGGTSTSGRSANPRGGGSDIQMTQSPSSLSASVGDRVTITCRASQSISSYLNWYQQKPGKAPKLLIYAASSLQSGVPSRFSGSGSGTDFTLTISSLQPEDFATYYCQQDNGYPSTFGGGTKVEIKR

SEQ ID NO: 864 - DNA, 516 bp, Artificial Sequence
  Synthetic
tcttgccttatgcatccgcattatgctcatgattattgctatgttggaggtggctcgagcggtggcagcggtggctctggtggtactagcacctctggtcgttccgctaacccacgtggcggcggttctgacatccagatgacccagagccccagcagcctgtctgctagcgtgggcgacagagtgaccatcacctgtagagccagccagagcatcagcagctacctgaactggtatcagcagaagcccggcaaggcccccaaactgctgatctacgccgccagctctctgcagtctggcgtgcccagcagattttccggcagcggctctggcaccgacttcaccctgaccatcagctccctgcagcccgaggacttcgccacctactactgccagcaggacaacggctaccccagcacctttggcggaggtaccaaggtggaaatcaagcgttgtgaggccactcacaagacatcaacttcacccattgtcaagagcttcaacaggaatgagtgt

SEQ ID NO: 865 - protein, 151 aa, Artificial Sequence
  Synthetic
SCLMHPHYAHDYCYVGGGSSGGSGGSGGTSTSGRSANPRGGGSDIQMTQSPSSLSASVGDRVTITCRASQSISSYLNWYQQKPGKAPKLLIYAASSLQSGVPSRFSGSGSGTDFTLTISSLQPEDFATYYCQQDNGYPSTFGGGTKVEIKR

SEQ ID NO: 866 - DNA, 534 bp, Artificial Sequence
  Synthetic
caaggtcagtctggatccttgtgcgaggttttgatgttgttgcagcatccgtggtgcatggggggaggtggctcgagcggtggcagcggtggctctggtggtactagcacctctggtcgttccgctaacccacgtggcggcggttctgacatccagatgacccagagccccagcagcctgtctgctagcgtgggcgacagagtgaccatcacctgtagagccagccagagcatcagcagctacctgaactggtatcagcagaagcccggcaaggcccccaaactgctgatctacgccgccagctctctgcagtctggcgtgcccagcagattttccggcagcggctctggcaccgacttcaccctgaccatcagctccctgcagcccgaggacttcgccacctactactgccagcaggacaacggctaccccagcacctttggcggaggtaccaaggtggaaatcaagcgttgtgaggccactcacaagacatcaacttcacccattgtcaagagcttcaacaggaatgagtgt

SEQ ID NO: 867 - protein, 157 aa, Artificial Sequence
  Synthetic
QGQSGSLCEVLMLLQHPWCMGGGGSSGGSGGSGGTSTSGRSANPRGGGSDIQMTQSPSSLSASVGDRVTITCRASQSISSYLNWYQQKPGKAPKLLIYAASSLQSGVPSRFSGSGSGTDFTLTISSLQPEDFATYYCQQDNGYPSTFGGGTKVEIKR

SEQ ID NO: 868 - DNA, 516 bp, Artificial Sequence
  Synthetic
ttgtgcgaggttttgatgttgttgcagcatccgtggtgcatggggggaggtggctcgagcggtggcagcggtggctctggtggtactagcacctctggtcgttccgctaacccacgtggcggcggttctgacatccagatgacccagagccccagcagcctgtctgctagcgtgggcgacagagtgaccatcacctgtagagccagccagagcatcagcagctacctgaactggtatcagcagaagcccggcaaggcccccaaactgctgatctacgccgccagctctctgcagtctggcgtgcccagcagattttccggcagcggctctggcaccgacttcaccctgaccatcagctccctgcagcccgaggacttcgccacctactactgccagcaggacaacggctaccccagcacctttggcggaggtaccaaggtggaaatcaagcgttgtgaggccactcacaagacatcaacttcacccattgtcaagagcttcaacaggaatgagtgt

SEQ ID NO: 869 - protein, 151 aa, Artificial Sequence
  Synthetic
LCEVLMLLQHPWCMGGGGSSGGSGGSGGTSTSGRSANPRGGGSDIQMTQSPSSLSASVGDRVTITCRASQSISSYLNWYQQKPGKAPKLLIYAASSLQSGVPSRFSGSGSGTDFTLTISSLQPEDFATYYCQQDNGYPSTFGGGTKVEIKR

SEQ ID NO: 870 - DNA, 534 bp, Artificial Sequence
  Synthetic
caaggtcagtctggatccattgcgtgccggcattttatggagcagttgccgttttgccatcatggaggtggctcgagcggtggcagcggtggctctggtggtactagcacctctggtcgttccgctaacccacgtggcggcggttctgacatccagatgacccagagccccagcagcctgtctgctagcgtgggcgacagagtgaccatcacctgtagagccagccagagcatcagcagctacctgaactggtatcagcagaagcccggcaaggcccccaaactgctgatctacgccgccagctctctgcagtctggcgtgcccagcagattttccggcagcggctctggcaccgacttcaccctgaccatcagctccctgcagcccgaggacttcgccacctactactgccagcaggacaacggctaccccagcacctttggcggaggtaccaaggtggaaatcaagcgttgtgaggccactcacaagacatcaacttcacccattgtcaagagcttcaacaggaatgagtgt

SEQ ID NO: 871 - protein, 157 aa, Artificial Sequence
  Synthetic
QGQSGSIACRHFMEQLPFCHHGGGSSGGSGGSGGTSTSGRSANPRGGGSDIQMTQSPSSLSASVGDRVTITCRASQSISSYLNWYQQKPGKAPKLLIYAASSLQSGVPSRFSGSGSGTDFTLTISSLQPEDFATYYCQQDNGYPSTFGGGTKVEIKR

SEQ ID NO: 872 - DNA, 516 bp, Artificial Sequence
  Synthetic
attgcgtgccggcattttatggagcagttgccgttttgccatcatggaggtggctcgagcggtggcagcggtggctctggtggtactagcacctctggtcgttccgctaacccacgtggcggcggttctgacatccagatgacccagagccccagcagcctgtctgctagcgtgggcgacagagtgaccatcacctgtagagccagccagagcatcagcagctacctgaactggtatcagcagaagcccggcaaggcccccaaactgctgatctacgccgccagctctctgcagtctggcgtgcccagcagattttccggcagcggctctggcaccgacttcaccctgaccatcagctccctgcagcccgaggacttcgccacctactactgccagcaggacaacggctaccccagcacctttggcggaggtaccaaggtggaaatcaagcgttgtgaggccactcacaagacatcaacttcacccattgtcaagagcttcaacaggaatgagtgt

SEQ ID NO: 873 - protein, 151 aa, Artificial Sequence
  Synthetic
IACRHFMEQLPFCHHGGGSSGGSGGSGGTSTSGRSANPRGGGSDIQMTQSPSSLSASVGDRVTITCRASQSISSYLNWYQQKPGKAPKLLIYAASSLQSGVPSRFSGSGSGTDFTLTISSLQPEDFATYYCQQDNGYPSTFGGGTKVEIKR

SEQ ID NO: 874 - DNA, 534 bp, Artificial Sequence
  Synthetic
caaggtcagtctggatcctttggtcctaggtgcggtgaggcttctacttgcgttccgtatgagggaggtggctcgagcggtggcagcggtggctctggtggtactagcacctctggtcgttccgctaacccacgtggcggcggttctgacatccagatgacccagagccccagcagcctgtctgctagcgtgggcgacagagtgaccatcacctgtagagccagccagagcatcagcagctacctgaactggtatcagcagaagcccggcaaggcccccaaactgctgatctacgccgccagctctctgcagtctggcgtgcccagcagattttccggcagcggctctggcaccgacttcaccctgaccatcagctccctgcagcccgaggacttcgccacctactactgccagcaggacaacggctaccccagcacctttggcggaggtaccaaggtggaaatcaagcgttgtgaggccactcacaagacatcaacttcacccattgtcaagagcttcaacaggaatgagtgt

SEQ ID NO: 875 - protein, 157 aa, Artificial Sequence
  Synthetic
QGQSGSFGPRCGEASTCVPYEGGGSSGGSGGSGGTSTSGRSANPRGGGSDIQMTQSPSSLSASVGDRVTITCRASQSISSYLNWYQQKPGKAPKLLIYAASSLQSGVPSRFSGSGSGTDFTLTISSLQPEDFATYYCQQDNGYPSTFGGGTKVEIKR

SEQ ID NO: 876 - DNA, 516 bp, Artificial Sequence
  Synthetic
tttggtcctaggtgcggtgaggcttctacttgcgttccgtatgagggaggtggctcgagcggtggcagcggtggctctggtggtactagcacctctggtcgttccgctaacccacgtggcggcggttctgacatccagatgacccagagccccagcagcctgtctgctagcgtgggcgacagagtgaccatcacctgtagagccagccagagcatcagcagctacctgaactggtatcagcagaagcccggcaaggcccccaaactgctgatctacgccgccagctctctgcagtctggcgtgcccagcagattttccggcagcggctctggcaccgacttcaccctgaccatcagctccctgcagcccgaggacttcgccacctactactgccagcaggacaacggctaccccagcacctttggcggaggtaccaaggtggaaatcaagcgttgtgaggccactcacaagacatcaacttcacccattgtcaagagcttcaacaggaatgagtgt

SEQ ID NO: 877 - protein, 151 aa, Artificial Sequence
  Synthetic
FGPRCGEASTCVPYEGGGSSGGSGGSGGTSTSGRSANPRGGGSDIQMTQSPSSLSASVGDRVTITCRASQSISSYLNWYQQKPGKAPKLLIYAASSLQSGVPSRFSGSGSGTDFTLTISSLQPEDFATYYCQQDNGYPSTFGGGTKVEIKR

SEQ ID NO: 878 - DNA, 534 bp, Artificial Sequence
  Synthetic
caaggtcagtctggatccattctttattgcgatagttggggggcggggtgcttgacgcggccgggaggtggctcgagcggtggcagcggtggctctggtggtactagcacctctggtcgttccgctaacccacgtggcggcggttctgacatccagatgacccagagccccagcagcctgtctgctagcgtgggcgacagagtgaccatcacctgtagagccagccagagcatcagcagctacctgaactggtatcagcagaagcccggcaaggcccccaaactgctgatctacgccgccagctctctgcagtctggcgtgcccagcagattttccggcagcggctctggcaccgacttcaccctgaccatcagctccctgcagcccgaggacttcgccacctactactgccagcaggacaacggctaccccagcacctttggcggaggtaccaaggtggaaatcaagcgttgtgaggccactcacaagacatcaacttcacccattgtcaagagcttcaacaggaatgagtgt

SEQ ID NO: 879 - protein, 157 aa, Artificial Sequence
  Synthetic
QGQSGSILYCDSWGAGCLTRPGGGSSGGSGGSGGTSTSGRSANPRGGGSDIQMTQSPSSLSASVGDRVTITCRASQSISSYLNWYQQKPGKAPKLLIYAASSLQSGVPSRFSGSGSGTDFTLTISSLQPEDFATYYCQQDNGYPSTFGGGTKVEIKR

SEQ ID NO: 880 - DNA, 516 bp, Artificial Sequence
  Synthetic
attctttattgcgatagttggggggcggggtgcttgacgcggccgggaggtggctcgagcggtggcagcggtggctctggtggtactagcacctctggtcgttccgctaacccacgtggcggcggttctgacatccagatgacccagagccccagcagcctgtctgctagcgtgggcgacagagtgaccatcacctgtagagccagccagagcatcagcagctacctgaactggtatcagcagaagcccggcaaggcccccaaactgctgatctacgccgccagctctctgcagtctggcgtgcccagcagattttccggcagcggctctggcaccgacttcaccctgaccatcagctccctgcagcccgaggacttcgccacctactactgccagcaggacaacggctaccccagcacctttggcggaggtaccaaggtggaaatcaagcgttgtgaggccactcacaagacatcaacttcacccattgtcaagagcttcaacaggaatgagtgt

SEQ ID NO: 881 - protein, 151 aa, Artificial Sequence
  Synthetic
ILYCDSWGAGCLTRPGGGSSGGSGGSGGTSTSGRSANPRGGGSDIQMTQSPSSLSASVGDRVTITCRASQSISSYLNWYQQKPGKAPKLLIYAASSLQSGVPSRFSGSGSGTDFTLTISSLQPEDFATYYCQQDNGYPSTFGGGTKVEIKR

SEQ ID NO: 882 - DNA, 534 bp, Artificial Sequence
  Synthetic
caaggtcagtctggatccgggattgcgttgtgcccgtctcatttttgccagctgcctcagactggaggtggctcgagcggtggcagcggtggctctggtggtactagcacctctggtcgttccgctaacccacgtggcggcggttctgacatccagatgacccagagccccagcagcctgtctgctagcgtgggcgacagagtgaccatcacctgtagagccagccagagcatcagcagctacctgaactggtatcagcagaagcccggcaaggcccccaaactgctgatctacgccgccagctctctgcagtctggcgtgcccagcagattttccggcagcggctctggcaccgacttcaccctgaccatcagctccctgcagcccgaggacttcgccacctactactgccagcaggacaacggctaccccagcacctttggcggaggtaccaaggtggaaatcaagcgttgtgaggccactcacaagacatcaacttcacccattgtcaagagcttcaacaggaatgagtgt

SEQ ID NO: 883 - protein, 157 aa, Artificial Sequence
  Synthetic
QGQSGSGIALCPSHFCQLPQTGGGSSGGSGGSGGTSTSGRSANPRGGGSDIQMTQSPSSLSASVGDRVTITCRASQSISSYLNWYQQKPGKAPKLLIYAASSLQSGVPSRFSGSGSGTDFTLTISSLQPEDFATYYCQQDNGYPSTFGGGTKVEIKR

SEQ ID NO: 884 - DNA, 516 bp, Artificial Sequence
  Synthetic
gggattgcgttgtgcccgtctcatttttgccagctgcctcagactggaggtggctcgagcggtggcagcggtggctctggtggtactagcacctctggtcgttccgctaacccacgtggcggcggttctgacatccagatgacccagagccccagcagcctgtctgctagcgtgggcgacagagtgaccatcacctgtagagccagccagagcatcagcagctacctgaactggtatcagcagaagcccggcaaggcccccaaactgctgatctacgccgccagctctctgcagtctggcgtgcccagcagattttccggcagcggctctggcaccgacttcaccctgaccatcagctccctgcagcccgaggacttcgccacctactactgccagcaggacaacggctaccccagcacctttggcggaggtaccaaggtggaaatcaagcgttgtgaggccactcacaagacatcaacttcacccattgtcaagagcttcaacaggaatgagtgt

SEQ ID NO: 885 - protein, 151 aa, Artificial Sequence
  Synthetic
GIALCPSHFCQLPQTGGGSSGGSGGSGGTSTSGRSANPRGGGSDIQMTQSPSSLSASVGDRVTITCRASQSISSYLNWYQQKPGKAPKLLIYAASSLQSGVPSRFSGSGSGTDFTLTISSLQPEDFATYYCQQDNGYPSTFGGGTKVEIKR

SEQ ID NO: 886 - DNA, 534 bp, Artificial Sequence
  Synthetic
caaggtcagtctggatccgatgggccgcgttgctttgtgtcgggggagtgctctccgattggtggaggtggctcgagcggtggcagcggtggctctggtggtactagcacctctggtcgttccgctaacccacgtggcggcggttctgacatccagatgacccagagccccagcagcctgtctgctagcgtgggcgacagagtgaccatcacctgtagagccagccagagcatcagcagctacctgaactggtatcagcagaagcccggcaaggcccccaaactgctgatctacgccgccagctctctgcagtctggcgtgcccagcagattttccggcagcggctctggcaccgacttcaccctgaccatcagctccctgcagcccgaggacttcgccacctactactgccagcaggacaacggctaccccagcacctttggcggaggtaccaaggtggaaatcaagcgttgtgaggccactcacaagacatcaacttcacccattgtcaagagcttcaacaggaatgagtgt

SEQ ID NO: 887 - protein, 157 aa, Artificial Sequence
  Synthetic
QGQSGSDGPRCFVSGECSPIGGGGSSGGSGGSGGTSTSGRSANPRGGGSDIQMTQSPSSLSASVGDRVTITCRASQSISSYLNWYQQKPGKAPKLLIYAASSLQSGVPSRFSGSGSGTDFTLTISSLQPEDFATYYCQQDNGYPSTFGGGTKVEIKR

SEQ ID NO: 888 - DNA, 516 bp, Artificial Sequence
  Synthetic
gatgggccgcgttgctttgtgtcgggggagtgctctccgattggtggaggtggctcgagcggtggcagcggtggctctggtggtactagcacctctggtcgttccgctaacccacgtggcggcggttctgacatccagatgacccagagccccagcagcctgtctgctagcgtgggcgacagagtgaccatcacctgtagagccagccagagcatcagcagctacctgaactggtatcagcagaagcccggcaaggcccccaaactgctgatctacgccgccagctctctgcagtctggcgtgcccagcagattttccggcagcggctctggcaccgacttcaccctgaccatcagctccctgcagcccgaggacttcgccacctactactgccagcaggacaacggctaccccagcacctttggcggaggtaccaaggtggaaatcaagcgttgtgaggccactcacaagacatcaacttcacccattgtcaagagcttcaacaggaatgagtgt

SEQ ID NO: 889 - protein, 151 aa, Artificial Sequence
  Synthetic
DGPRCFVSGECSPIGGGGSSGGSGGSGGTSTSGRSANPRGGGSDIQMTQSPSSLSASVGDRVTITCRASQSISSYLNWYQQKPGKAPKLLIYAASSLQSGVPSRFSGSGSGTDFTLTISSLQPEDFATYYCQQDNGYPSTFGGGTKVEIKR

SEQ ID NO: 890 - DNA, 534 bp, Artificial Sequence
  Synthetic
caaggtcagtctggatccttgtgctataagctggattatgatgataggtcttattgccatattggaggtggctcgagcggtggcagcggtggctctggtggtactagcacctctggtcgttccgctaacccacgtggcggcggttctgacatccagatgacccagagccccagcagcctgtctgctagcgtgggcgacagagtgaccatcacctgtagagccagccagagcatcagcagctacctgaactggtatcagcagaagcccggcaaggcccccaaactgctgatctacgccgccagctctctgcagtctggcgtgcccagcagattttccggcagcggctctggcaccgacttcaccctgaccatcagctccctgcagcccgaggacttcgccacctactactgccagcaggacaacggctaccccagcacctttggcggaggtaccaaggtggaaatcaagcgttgtgaggccactcacaagacatcaacttcacccattgtcaagagcttcaacaggaatgagtgt

SEQ ID NO: 891 - protein, 157 aa, Artificial Sequence
  Synthetic
QGQSGSLCYKLDYDDRSYCHIGGGSSGGSGGSGGTSTSGRSANPRGGGSDIQMTQSPSSLSASVGDRVTITCRASQSISSYLNWYQQKPGKAPKLLIYAASSLQSGVPSRFSGSGSGTDFTLTISSLQPEDFATYYCQQDNGYPSTFGGGTKVEIKR

SEQ ID NO: 892 - DNA, 516 bp, Artificial Sequence
  Synthetic
ttgtgctataagctggattatgatgataggtcttattgccatattggaggtggctcgagcggtggcagcggtggctctggtggtactagcacctctggtcgttccgctaacccacgtggcggcggttctgacatccagatgacccagagccccagcagcctgtctgctagcgtgggcgacagagtgaccatcacctgtagagccagccagagcatcagcagctacctgaactggtatcagcagaagcccggcaaggcccccaaactgctgatctacgccgccagctctctgcagtctggcgtgcccagcagattttccggcagcggctctggcaccgacttcaccctgaccatcagctccctgcagcccgaggacttcgccacctactactgccagcaggacaacggctaccccagcacctttggcggaggtaccaaggtggaaatcaagcgttgtgaggccactcacaagacatcaacttcacccattgtcaagagcttcaacaggaatgagtgt

SEQ ID NO: 893 - protein, 151 aa, Artificial Sequence
  Synthetic
LCYKLDYDDRSYCHIGGGSSGGSGGSGGTSTSGRSANPRGGGSDIQMTQSPSSLSASVGDRVTITCRASQSISSYLNWYQQKPGKAPKLLIYAASSLQSGVPSRFSGSGSGTDFTLTISSLQPEDFATYYCQQDNGYPSTFGGGTKVEIKR

SEQ ID NO: 894 - DNA, 534 bp, Artificial Sequence
  Synthetic
caaggtcagtctggatccccgtgccatccgcatccttatgatgctcgtccttattgcaatgtgggaggtggctcgagcggtggcagcggtggctctggtggtactagcacctctggtcgttccgctaacccacgtggcggcggttctgacatccagatgacccagagccccagcagcctgtctgctagcgtgggcgacagagtgaccatcacctgtagagccagccagagcatcagcagctacctgaactggtatcagcagaagcccggcaaggcccccaaactgctgatctacgccgccagctctctgcagtctggcgtgcccagcagattttccggcagcggctctggcaccgacttcaccctgaccatcagctccctgcagcccgaggacttcgccacctactactgccagcaggacaacggctaccccagcacctttggcggaggtaccaaggtggaaatcaagcgttgtgaggccactcacaagacatcaacttcacccattgtcaagagcttcaacaggaatgagtgt

SEQ ID NO: 895 - protein, 157 aa, Artificial Sequence
  Synthetic
QGQSGSPCHPHPYDARPYCNVGGGSSGGSGGSGGTSTSGRSANPRGGGSDIQMTQSPSSLSASVGDRVTITCRASQSISSYLNWYQQKPGKAPKLLIYAASSLQSGVPSRFSGSGSGTDFTLTISSLQPEDFATYYCQQDNGYPSTFGGGTKVEIKR

SEQ ID NO: 896 - DNA, 516 bp, Artificial Sequence
  Synthetic
ccgtgccatccgcatccttatgatgctcgtccttattgcaatgtgggaggtggctcgagcggtggcagcggtggctctggtggtactagcacctctggtcgttccgctaacccacgtggcggcggttctgacatccagatgacccagagccccagcagcctgtctgctagcgtgggcgacagagtgaccatcacctgtagagccagccagagcatcagcagctacctgaactggtatcagcagaagcccggcaaggcccccaaactgctgatctacgccgccagctctctgcagtctggcgtgcccagcagattttccggcagcggctctggcaccgacttcaccctgaccatcagctccctgcagcccgaggacttcgccacctactactgccagcaggacaacggctaccccagcacctttggcggaggtaccaaggtggaaatcaagcgttgtgaggccactcacaagacatcaacttcacccattgtcaagagcttcaacaggaatgagtgt

SEQ ID NO: 897 - protein, 151 aa, Artificial Sequence
  Synthetic
PCHPHPYDARPYCNVGGGSSGGSGGSGGTSTSGRSANPRGGGSDIQMTQSPSSLSASVGDRVTITCRASQSISSYLNWYQQKPGKAPKLLIYAASSLQSGVPSRFSGSGSGTDFTLTISSLQPEDFATYYCQQDNGYPSTFGGGTKVEIKR

SEQ ID NO: 898 - DNA, 534 bp, Artificial Sequence
  Synthetic
caaggtcagtctggatccccttgctattggcatcctttttttgcgtataggtattgcaatactggaggtggctcgagcggtggcagcggtggctctggtggtactagcacctctggtcgttccgctaacccacgtggcggcggttctgacatccagatgacccagagccccagcagcctgtctgctagcgtgggcgacagagtgaccatcacctgtagagccagccagagcatcagcagctacctgaactggtatcagcagaagcccggcaaggcccccaaactgctgatctacgccgccagctctctgcagtctggcgtgcccagcagattttccggcagcggctctggcaccgacttcaccctgaccatcagctccctgcagcccgaggacttcgccacctactactgccagcaggacaacggctaccccagcacctttggcggaggtaccaaggtggaaatcaagcgttgtgaggccactcacaagacatcaacttcacccattgtcaagagcttcaacaggaatgagtgt

SEQ ID NO: 899 - protein, 157 aa, Artificial Sequence
  Synthetic
QGQSGSPCYWHPFFAYRYCNTGGGSSGGSGGSGGTSTSGRSANPRGGGSDIQMTQSPSSLSASVGDRVTITCRASQSISSYLNWYQQKPGKAPKLLIYAASSLQSGVPSRFSGSGSGTDFTLTISSLQPEDFATYYCQQDNGYPSTFGGGTKVEIKR

SEQ ID NO: 900 - DNA, 516 bp, Artificial Sequence
  Synthetic
ccttgctattggcatcctttttttgcgtataggtattgcaatactggaggtggctcgagcggtggcagcggtggctctggtggtactagcacctctggtcgttccgctaacccacgtggcggcggttctgacatccagatgacccagagccccagcagcctgtctgctagcgtgggcgacagagtgaccatcacctgtagagccagccagagcatcagcagctacctgaactggtatcagcagaagcccggcaaggcccccaaactgctgatctacgccgccagctctctgcagtctggcgtgcccagcagattttccggcagcggctctggcaccgacttcaccctgaccatcagctccctgcagcccgaggacttcgccacctactactgccagcaggacaacggctaccccagcacctttggcggaggtaccaaggtggaaatcaagcgttgtgaggccactcacaagacatcaacttcacccattgtcaagagcttcaacaggaatgagtgt

SEQ ID NO: 901 - protein, 151 aa, Artificial Sequence
  Synthetic
PCYWHPFFAYRYCNTGGGSSGGSGGSGGTSTSGRSANPRGGGSDIQMTQSPSSLSASVGDRVTITCRASQSISSYLNWYQQKPGKAPKLLIYAASSLQSGVPSRFSGSGSGTDFTLTISSLQPEDFATYYCQQDNGYPSTFGGGTKVEIKR

SEQ ID NO: 902 - DNA, 534 bp, Artificial Sequence
  Synthetic
caaggtcagtctggatccgtttgctattatatggattggttggggcggaattggtgctcttcgggaggtggctcgagcggtggcagcggtggctctggtggtactagcacctctggtcgttccgctaacccacgtggcggcggttctgacatccagatgacccagagccccagcagcctgtctgctagcgtgggcgacagagtgaccatcacctgtagagccagccagagcatcagcagctacctgaactggtatcagcagaagcccggcaaggcccccaaactgctgatctacgccgccagctctctgcagtctggcgtgcccagcagattttccggcagcggctctggcaccgacttcaccctgaccatcagctccctgcagcccgaggacttcgccacctactactgccagcaggacaacggctaccccagcacctttggcggaggtaccaaggtggaaatcaagcgttgtgaggccactcacaagacatcaacttcacccattgtcaagagcttcaacaggaatgagtgt

SEQ ID NO: 903 - protein, 157 aa, Artificial Sequence
  Synthetic
QGQSGSVCYYMDWLGRNWCSSGGGSSGGSGGSGGTSTSGRSANPRGGGSDIQMTQSPSSLSASVGDRVTITCRASQSISSYLNWYQQKPGKAPKLLIYAASSLQSGVPSRFSGSGSGTDFTLTISSLQPEDFATYYCQQDNGYPSTFGGGTKVEIKR

SEQ ID NO: 904 - DNA, 516 bp, Artificial Sequence
  Synthetic
gtttgctattatatggattggttggggcggaattggtgctcttcgggaggtggctcgagcggtggcagcggtggctctggtggtactagcacctctggtcgttccgctaacccacgtggcggcggttctgacatccagatgacccagagccccagcagcctgtctgctagcgtgggcgacagagtgaccatcacctgtagagccagccagagcatcagcagctacctgaactggtatcagcagaagcccggcaaggcccccaaactgctgatctacgccgccagctctctgcagtctggcgtgcccagcagattttccggcagcggctctggcaccgacttcaccctgaccatcagctccctgcagcccgaggacttcgccacctactactgccagcaggacaacggctaccccagcacctttggcggaggtaccaaggtggaaatcaagcgttgtgaggccactcacaagacatcaacttcacccattgtcaagagcttcaacaggaatgagtgt

SEQ ID NO: 905 - protein, 151 aa, Artificial Sequence
  Synthetic
VCYYMDWLGRNWCSSGGGSSGGSGGSGGTSTSGRSANPRGGGSDIQMTQSPSSLSASVGDRVTITCRASQSISSYLNWYQQKPGKAPKLLIYAASSLQSGVPSRFSGSGSGTDFTLTISSLQPEDFATYYCQQDNGYPSTFGGGTKVEIKR

SEQ ID NO: 906 - DNA, 534 bp, Artificial Sequence
  Synthetic
caaggtcagtctggatccctgtgcgatctgtttaagttgcgtgagtttccttattgcatggggggaggtggctcgagcggtggcagcggtggctctggtggtactagcacctctggtcgttccgctaacccacgtggcggcggttctgacatccagatgacccagagccccagcagcctgtctgctagcgtgggcgacagagtgaccatcacctgtagagccagccagagcatcagcagctacctgaactggtatcagcagaagcccggcaaggcccccaaactgctgatctacgccgccagctctctgcagtctggcgtgcccagcagattttccggcagcggctctggcaccgacttcaccctgaccatcagctccctgcagcccgaggacttcgccacctactactgccagcaggacaacggctaccccagcacctttggcggaggtaccaaggtggaaatcaagcgttgtgaggccactcacaagacatcaacttcacccattgtcaagagcttcaacaggaatgagtgt

SEQ ID NO: 907 - protein, 157 aa, Artificial Sequence
  Synthetic
QGQSGSLCDLFKLREFPYCMGGGGSSGGSGGSGGTSTSGRSANPRGGGSDIQMTQSPSSLSASVGDRVTITCRASQSISSYLNWYQQKPGKAPKLLIYAASSLQSGVPSRFSGSGSGTDFTLTISSLQPEDFATYYCQQDNGYPSTFGGGTKVEIKR

SEQ ID NO: 908 - DNA, 516 bp, Artificial Sequence
  Synthetic
ctgtgcgatctgtttaagttgcgtgagtttccttattgcatggggggaggtggctcgagcggtggcagcggtggctctggtggtactagcacctctggtcgttccgctaacccacgtggcggcggttctgacatccagatgacccagagccccagcagcctgtctgctagcgtgggcgacagagtgaccatcacctgtagagccagccagagcatcagcagctacctgaactggtatcagcagaagcccggcaaggcccccaaactgctgatctacgccgccagctctctgcagtctggcgtgcccagcagattttccggcagcggctctggcaccgacttcaccctgaccatcagctccctgcagcccgaggacttcgccacctactactgccagcaggacaacggctaccccagcacctttggcggaggtaccaaggtggaaatcaagcgttgtgaggccactcacaagacatcaacttcacccattgtcaagagcttcaacaggaatgagtgt

SEQ ID NO: 909 - protein, 151 aa, Artificial Sequence
  Synthetic
LCDLFKLREFPYCMGGGGSSGGSGGSGGTSTSGRSANPRGGGSDIQMTQSPSSLSASVGDRVTITCRASQSISSYLNWYQQKPGKAPKLLIYAASSLQSGVPSRFSGSGSGTDFTLTISSLQPEDFATYYCQQDNGYPSTFGGGTKVEIKR

SEQ ID NO: 910 - DNA, 534 bp, Artificial Sequence
  Synthetic
caaggtcagtctggatcctatcttccgtgccattttgttccgattggggcttgcaataataagggaggtggctcgagcggtggcagcggtggctctggtggtactagcacctctggtcgttccgctaacccacgtggcggcggttctgacatccagatgacccagagccccagcagcctgtctgctagcgtgggcgacagagtgaccatcacctgtagagccagccagagcatcagcagctacctgaactggtatcagcagaagcccggcaaggcccccaaactgctgatctacgccgccagctctctgcagtctggcgtgcccagcagattttccggcagcggctctggcaccgacttcaccctgaccatcagctccctgcagcccgaggacttcgccacctactactgccagcaggacaacggctaccccagcacctttggcggaggtaccaaggtggaaatcaagcgttgtgaggccactcacaagacatcaacttcacccattgtcaagagcttcaacaggaatgagtgt

SEQ ID NO: 911 - protein, 157 aa, Artificial Sequence
  Synthetic
QGQSGSYLPCHFVPIGACNNKGGGSSGGSGGSGGTSTSGRSANPRGGGSDIQMTQSPSSLSASVGDRVTITCRASQSISSYLNWYQQKPGKAPKLLIYAASSLQSGVPSRFSGSGSGTDFTLTISSLQPEDFATYYCQQDNGYPSTFGGGTKVEIKR

SEQ ID NO: 912 - DNA, 516 bp, Artificial Sequence
  Synthetic
tatcttccgtgccattttgttccgattggggcttgcaataataagggaggtggctcgagcggtggcagcggtggctctggtggtactagcacctctggtcgttccgctaacccacgtggcggcggttctgacatccagatgacccagagccccagcagcctgtctgctagcgtgggcgacagagtgaccatcacctgtagagccagccagagcatcagcagctacctgaactggtatcagcagaagcccggcaaggcccccaaactgctgatctacgccgccagctctctgcagtctggcgtgcccagcagattttccggcagcggctctggcaccgacttcaccctgaccatcagctccctgcagcccgaggacttcgccacctactactgccagcaggacaacggctaccccagcacctttggcggaggtaccaaggtggaaatcaagcgttgtgaggccactcacaagacatcaacttcacccattgtcaagagcttcaacaggaatgagtgt

SEQ ID NO: 913 - protein, 151 aa, Artificial Sequence
  Synthetic
YLPCHFVPIGACNNKGGGSSGGSGGSGGTSTSGRSANPRGGGSDIQMTQSPSSLSASVGDRVTITCRASQSISSYLNWYQQKPGKAPKLLIYAASSLQSGVPSRFSGSGSGTDFTLTISSLQPEDFATYYCQQDNGYPSTFGGGTKVEIKR

SEQ ID NO: 914 - DNA, 534 bp, Artificial Sequence
  Synthetic
caaggtcagtctggatccattttttgccatatgggtgttgtggttcctcagtgcgcgaattatggaggtggctcgagcggtggcagcggtggctctggtggtactagcacctctggtcgttccgctaacccacgtggcggcggttctgacatccagatgacccagagccccagcagcctgtctgctagcgtgggcgacagagtgaccatcacctgtagagccagccagagcatcagcagctacctgaactggtatcagcagaagcccggcaaggcccccaaactgctgatctacgccgccagctctctgcagtctggcgtgcccagcagattttccggcagcggctctggcaccgacttcaccctgaccatcagctccctgcagcccgaggacttcgccacctactactgccagcaggacaacggctaccccagcacctttggcggaggtaccaaggtggaaatcaagcgttgtgaggccactcacaagacatcaacttcacccattgtcaagagcttcaacaggaatgagtgt

SEQ ID NO: 915 - protein, 157 aa, Artificial Sequence
  Synthetic
QGQSGSIFCHMGVVVPQCANYGGGSSGGSGGSGGTSTSGRSANPRGGGSDIQMTQSPSSLSASVGDRVTITCRASQSISSYLNWYQQKPGKAPKLLIYAASSLQSGVPSRFSGSGSGTDFTLTISSLQPEDFATYYCQQDNGYPSTFGGGTKVEIKR

SEQ ID NO: 916 - DNA, 516 bp, Artificial Sequence
  Synthetic
attttttgccatatgggtgttgtggttcctcagtgcgcgaattatggaggtggctcgagcggtggcagcggtggctctggtggtactagcacctctggtcgttccgctaacccacgtggcggcggttctgacatccagatgacccagagccccagcagcctgtctgctagcgtgggcgacagagtgaccatcacctgtagagccagccagagcatcagcagctacctgaactggtatcagcagaagcccggcaaggcccccaaactgctgatctacgccgccagctctctgcagtctggcgtgcccagcagattttccggcagcggctctggcaccgacttcaccctgaccatcagctccctgcagcccgaggacttcgccacctactactgccagcaggacaacggctaccccagcacctttggcggaggtaccaaggtggaaatcaagcgttgtgaggccactcacaagacatcaacttcacccattgtcaagagcttcaacaggaatgagtgt

SEQ ID NO: 917 - protein, 151 aa, Artificial Sequence
  Synthetic
IFCHMGVVVPQCANYGGGSSGGSGGSGGTSTSGRSANPRGGGSDIQMTQSPSSLSASVGDRVTITCRASQSISSYLNWYQQKPGKAPKLLIYAASSLQSGVPSRFSGSGSGTDFTLTISSLQPEDFATYYCQQDNGYPSTFGGGTKVEIKR

SEQ ID NO: 918 - DNA, 534 bp, Artificial Sequence
  Synthetic
caaggtcagtctggatccgcgtgccatccgcatccttatgatgctcgtccttattgcaatgtgggaggtggctcgagcggtggcagcggtggctctggtggtactagcacctctggtcgttccgctaacccacgtggcggcggttctgacatccagatgacccagagccccagcagcctgtctgctagcgtgggcgacagagtgaccatcacctgtagagccagccagagcatcagcagctacctgaactggtatcagcagaagcccggcaaggcccccaaactgctgatctacgccgccagctctctgcagtctggcgtgcccagcagattttccggcagcggctctggcaccgacttcaccctgaccatcagctccctgcagcccgaggacttcgccacctactactgccagcaggacaacggctaccccagcacctttggcggaggtaccaaggtggaaatcaagcgttgtgaggccactcacaagacatcaacttcacccattgtcaagagcttcaacaggaatgagtgt

SEQ ID NO: 919 - protein, 157 aa, Artificial Sequence
  Synthetic
QGQSGSACHPHPYDARPYCNVGGGSSGGSGGSGGTSTSGRSANPRGGGSDIQMTQSPSSLSASVGDRVTITCRASQSISSYLNWYQQKPGKAPKLLIYAASSLQSGVPSRFSGSGSGTDFTLTISSLQPEDFATYYCQQDNGYPSTFGGGTKVEIKR

SEQ ID NO: 920 - DNA, 516 bp, Artificial Sequence
  Synthetic
gcgtgccatccgcatccttatgatgctcgtccttattgcaatgtgggaggtggctcgagcggtggcagcggtggctctggtggtactagcacctctggtcgttccgctaacccacgtggcggcggttctgacatccagatgacccagagccccagcagcctgtctgctagcgtgggcgacagagtgaccatcacctgtagagccagccagagcatcagcagctacctgaactggtatcagcagaagcccggcaaggcccccaaactgctgatctacgccgccagctctctgcagtctggcgtgcccagcagattttccggcagcggctctggcaccgacttcaccctgaccatcagctccctgcagcccgaggacttcgccacctactactgccagcaggacaacggctaccccagcacctttggcggaggtaccaaggtggaaatcaagcgttgtgaggccactcacaagacatcaacttcacccattgtcaagagcttcaacaggaatgagtgt

SEQ ID NO: 921 - protein, 151 aa, Artificial Sequence
  Synthetic
ACHPHPYDARPYCNVGGGSSGGSGGSGGTSTSGRSANPRGGGSDIQMTQSPSSLSASVGDRVTITCRASQSISSYLNWYQQKPGKAPKLLIYAASSLQSGVPSRFSGSGSGTDFTLTISSLQPEDFATYYCQQDNGYPSTFGGGTKVEIKR

SEQ ID NO: 922 - DNA, 534 bp, Artificial Sequence
  Synthetic
caaggtcagtctggatccccgtgccatccggctccttatgatgctcgtccttattgcaatgtgggaggtggctcgagcggtggcagcggtggctctggtggtactagcacctctggtcgttccgctaacccacgtggcggcggttctgacatccagatgacccagagccccagcagcctgtctgctagcgtgggcgacagagtgaccatcacctgtagagccagccagagcatcagcagctacctgaactggtatcagcagaagcccggcaaggcccccaaactgctgatctacgccgccagctctctgcagtctggcgtgcccagcagattttccggcagcggctctggcaccgacttcaccctgaccatcagctccctgcagcccgaggacttcgccacctactactgccagcaggacaacggctaccccagcacctttggcggaggtaccaaggtggaaatcaagcgttgtgaggccactcacaagacatcaacttcacccattgtcaagagcttcaacaggaatgagtgt

SEQ ID NO: 923 - protein, 157 aa, Artificial Sequence
  Synthetic
QGQSGSPCHPAPYDARPYCNVGGGSSGGSGGSGGTSTSGRSANPRGGGSDIQMTQSPSSLSASVGDRVTITCRASQSISSYLNWYQQKPGKAPKLLIYAASSLQSGVPSRFSGSGSGTDFTLTISSLQPEDFATYYCQQDNGYPSTFGGGTKVEIKR

SEQ ID NO: 924 - DNA, 516 bp, Artificial Sequence
  Synthetic
ccgtgccatccggctccttatgatgctcgtccttattgcaatgtgggaggtggctcgagcggtggcagcggtggctctggtggtactagcacctctggtcgttccgctaacccacgtggcggcggttctgacatccagatgacccagagccccagcagcctgtctgctagcgtgggcgacagagtgaccatcacctgtagagccagccagagcatcagcagctacctgaactggtatcagcagaagcccggcaaggcccccaaactgctgatctacgccgccagctctctgcagtctggcgtgcccagcagattttccggcagcggctctggcaccgacttcaccctgaccatcagctccctgcagcccgaggacttcgccacctactactgccagcaggacaacggctaccccagcacctttggcggaggtaccaaggtggaaatcaagcgttgtgaggccactcacaagacatcaacttcacccattgtcaagagcttcaacaggaatgagtgt

SEQ ID NO: 925 - protein, 151 aa, Artificial Sequence
  Synthetic
PCHPAPYDARPYCNVGGGSSGGSGGSGGTSTSGRSANPRGGGSDIQMTQSPSSLSASVGDRVTITCRASQSISSYLNWYQQKPGKAPKLLIYAASSLQSGVPSRFSGSGSGTDFTLTISSLQPEDFATYYCQQDNGYPSTFGGGTKVEIKR

SEQ ID NO: 926 - DNA, 534 bp, Artificial Sequence
  Synthetic
caaggtcagtctggatccccgtgccatccgcatgcttatgatgctcgtccttattgcaatgtgggaggtggctcgagcggtggcagcggtggctctggtggtactagcacctctggtcgttccgctaacccacgtggcggcggttctgacatccagatgacccagagccccagcagcctgtctgctagcgtgggcgacagagtgaccatcacctgtagagccagccagagcatcagcagctacctgaactggtatcagcagaagcccggcaaggcccccaaactgctgatctacgccgccagctctctgcagtctggcgtgcccagcagattttccggcagcggctctggcaccgacttcaccctgaccatcagctccctgcagcccgaggacttcgccacctactactgccagcaggacaacggctaccccagcacctttggcggaggtaccaaggtggaaatcaagcgttgtgaggccactcacaagacatcaacttcacccattgtcaagagcttcaacaggaatgagtgt

SEQ ID NO: 927 - protein, 157 aa, Artificial Sequence
  Synthetic
QGQSGSPCHPHAYDARPYCNVGGGSSGGSGGSGGTSTSGRSANPRGGGSDIQMTQSPSSLSASVGDRVTITCRASQSISSYLNWYQQKPGKAPKLLIYAASSLQSGVPSRFSGSGSGTDFTLTISSLQPEDFATYYCQQDNGYPSTFGGGTKVEIKR

SEQ ID NO: 928 - DNA, 516 bp, Artificial Sequence
  Synthetic
ccgtgccatccgcatgcttatgatgctcgtccttattgcaatgtgggaggtggctcgagcggtggcagcggtggctctggtggtactagcacctctggtcgttccgctaacccacgtggcggcggttctgacatccagatgacccagagccccagcagcctgtctgctagcgtgggcgacagagtgaccatcacctgtagagccagccagagcatcagcagctacctgaactggtatcagcagaagcccggcaaggcccccaaactgctgatctacgccgccagctctctgcagtctggcgtgcccagcagattttccggcagcggctctggcaccgacttcaccctgaccatcagctccctgcagcccgaggacttcgccacctactactgccagcaggacaacggctaccccagcacctttggcggaggtaccaaggtggaaatcaagcgttgtgaggccactcacaagacatcaacttcacccattgtcaagagcttcaacaggaatgagtgt

SEQ ID NO: 929 - protein, 151 aa, Artificial Sequence
  Synthetic
PCHPHAYDARPYCNVGGGSSGGSGGSGGTSTSGRSANPRGGGSDIQMTQSPSSLSASVGDRVTITCRASQSISSYLNWYQQKPGKAPKLLIYAASSLQSGVPSRFSGSGSGTDFTLTISSLQPEDFATYYCQQDNGYPSTFGGGTKVEIKR

SEQ ID NO: 930 - DNA, 534 bp, Artificial Sequence
  Synthetic
caaggtcagtctggatccccgtgccatccgcatcctgctgatgctcgtccttattgcaatgtgggaggtggctcgagcggtggcagcggtggctctggtggtactagcacctctggtcgttccgctaacccacgtggcggcggttctgacatccagatgacccagagccccagcagcctgtctgctagcgtgggcgacagagtgaccatcacctgtagagccagccagagcatcagcagctacctgaactggtatcagcagaagcccggcaaggcccccaaactgctgatctacgccgccagctctctgcagtctggcgtgcccagcagattttccggcagcggctctggcaccgacttcaccctgaccatcagctccctgcagcccgaggacttcgccacctactactgccagcaggacaacggctaccccagcacctttggcggaggtaccaaggtggaaatcaagcgttgtgaggccactcacaagacatcaacttcacccattgtcaagagcttcaacaggaatgagtgt

SEQ ID NO: 931 - protein, 157 aa, Artificial Sequence
  Synthetic
QGQSGSPCHPHPADARPYCNVGGGSSGGSGGSGGTSTSGRSANPRGGGSDIQMTQSPSSLSASVGDRVTITCRASQSISSYLNWYQQKPGKAPKLLIYAASSLQSGVPSRFSGSGSGTDFTLTISSLQPEDFATYYCQQDNGYPSTFGGGTKVEIKR

SEQ ID NO: 932 - DNA, 516 bp, Artificial Sequence
  Synthetic
ccgtgccatccgcatcctgctgatgctcgtccttattgcaatgtgggaggtggctcgagcggtggcagcggtggctctggtggtactagcacctctggtcgttccgctaacccacgtggcggcggttctgacatccagatgacccagagccccagcagcctgtctgctagcgtgggcgacagagtgaccatcacctgtagagccagccagagcatcagcagctacctgaactggtatcagcagaagcccggcaaggcccccaaactgctgatctacgccgccagctctctgcagtctggcgtgcccagcagattttccggcagcggctctggcaccgacttcaccctgaccatcagctccctgcagcccgaggacttcgccacctactactgccagcaggacaacggctaccccagcacctttggcggaggtaccaaggtggaaatcaagcgttgtgaggccactcacaagacatcaacttcacccattgtcaagagcttcaacaggaatgagtgt

SEQ ID NO: 933 - protein, 151 aa, Artificial Sequence
  Synthetic
PCHPHPADARPYCNVGGGSSGGSGGSGGTSTSGRSANPRGGGSDIQMTQSPSSLSASVGDRVTITCRASQSISSYLNWYQQKPGKAPKLLIYAASSLQSGVPSRFSGSGSGTDFTLTISSLQPEDFATYYCQQDNGYPSTFGGGTKVEIKR

SEQ ID NO: 934 - DNA, 534 bp, Artificial Sequence
  Synthetic
caaggtcagtctggatccccgtgccatccgcatccttatgctgctcgtccttattgcaatgtgggaggtggctcgagcggtggcagcggtggctctggtggtactagcacctctggtcgttccgctaacccacgtggcggcggttctgacatccagatgacccagagccccagcagcctgtctgctagcgtgggcgacagagtgaccatcacctgtagagccagccagagcatcagcagctacctgaactggtatcagcagaagcccggcaaggcccccaaactgctgatctacgccgccagctctctgcagtctggcgtgcccagcagattttccggcagcggctctggcaccgacttcaccctgaccatcagctccctgcagcccgaggacttcgccacctactactgccagcaggacaacggctaccccagcacctttggcggaggtaccaaggtggaaatcaagcgttgtgaggccactcacaagacatcaacttcacccattgtcaagagcttcaacaggaatgagtgt

SEQ ID NO: 935 - protein, 157 aa, Artificial Sequence
  Synthetic
QGQSGSPCHPHPYAARPYCNVGGGSSGGSGGSGGTSTSGRSANPRGGGSDIQMTQSPSSLSASVGDRVTITCRASQSISSYLNWYQQKPGKAPKLLIYAASSLQSGVPSRFSGSGSGTDFTLTISSLQPEDFATYYCQQDNGYPSTFGGGTKVEIKR

SEQ ID NO: 936 - DNA, 516 bp, Artificial Sequence
  Synthetic
ccgtgccatccgcatccttatgctgctcgtccttattgcaatgtgggaggtggctcgagcggtggcagcggtggctctggtggtactagcacctctggtcgttccgctaacccacgtggcggcggttctgacatccagatgacccagagccccagcagcctgtctgctagcgtgggcgacagagtgaccatcacctgtagagccagccagagcatcagcagctacctgaactggtatcagcagaagcccggcaaggcccccaaactgctgatctacgccgccagctctctgcagtctggcgtgcccagcagattttccggcagcggctctggcaccgacttcaccctgaccatcagctccctgcagcccgaggacttcgccacctactactgccagcaggacaacggctaccccagcacctttggcggaggtaccaaggtggaaatcaagcgttgtgaggccactcacaagacatcaacttcacccattgtcaagagcttcaacaggaatgagtgt

SEQ ID NO: 937 - protein, 151 aa, Artificial Sequence
  Synthetic
PCHPHPYAARPYCNVGGGSSGGSGGSGGTSTSGRSANPRGGGSDIQMTQSPSSLSASVGDRVTITCRASQSISSYLNWYQQKPGKAPKLLIYAASSLQSGVPSRFSGSGSGTDFTLTISSLQPEDFATYYCQQDNGYPSTFGGGTKVEIKR

SEQ ID NO: 938 - DNA, 534 bp, Artificial Sequence
  Synthetic
caaggtcagtctggatccccgtgccatccgcatccttatgatgctgctccttattgcaatgtgggaggtggctcgagcggtggcagcggtggctctggtggtactagcacctctggtcgttccgctaacccacgtggcggcggttctgacatccagatgacccagagccccagcagcctgtctgctagcgtgggcgacagagtgaccatcacctgtagagccagccagagcatcagcagctacctgaactggtatcagcagaagcccggcaaggcccccaaactgctgatctacgccgccagctctctgcagtctggcgtgcccagcagattttccggcagcggctctggcaccgacttcaccctgaccatcagctccctgcagcccgaggacttcgccacctactactgccagcaggacaacggctaccccagcacctttggcggaggtaccaaggtggaaatcaagcgttgtgaggccactcacaagacatcaacttcacccattgtcaagagcttcaacaggaatgagtgt

SEQ ID NO: 939 - protein, 157 aa, Artificial Sequence
  Synthetic
QGQSGSPCHPHPYDAAPYCNVGGGSSGGSGGSGGTSTSGRSANPRGGGSDIQMTQSPSSLSASVGDRVTITCRASQSISSYLNWYQQKPGKAPKLLIYAASSLQSGVPSRFSGSGSGTDFTLTISSLQPEDFATYYCQQDNGYPSTFGGGTKVEIKR

SEQ ID NO: 940 - DNA, 516 bp, Artificial Sequence
  Synthetic
ccgtgccatccgcatccttatgatgctgctccttattgcaatgtgggaggtggctcgagcggtggcagcggtggctctggtggtactagcacctctggtcgttccgctaacccacgtggcggcggttctgacatccagatgacccagagccccagcagcctgtctgctagcgtgggcgacagagtgaccatcacctgtagagccagccagagcatcagcagctacctgaactggtatcagcagaagcccggcaaggcccccaaactgctgatctacgccgccagctctctgcagtctggcgtgcccagcagattttccggcagcggctctggcaccgacttcaccctgaccatcagctccctgcagcccgaggacttcgccacctactactgccagcaggacaacggctaccccagcacctttggcggaggtaccaaggtggaaatcaagcgttgtgaggccactcacaagacatcaacttcacccattgtcaagagcttcaacaggaatgagtgt

SEQ ID NO: 941 - protein, 151 aa, Artificial Sequence
  Synthetic
PCHPHPYDAAPYCNVGGGSSGGSGGSGGTSTSGRSANPRGGGSDIQMTQSPSSLSASVGDRVTITCRASQSISSYLNWYQQKPGKAPKLLIYAASSLQSGVPSRFSGSGSGTDFTLTISSLQPEDFATYYCQQDNGYPSTFGGGTKVEIKR

SEQ ID NO: 942 - DNA, 534 bp, Artificial Sequence
  Synthetic
caaggtcagtctggatccccgtgccatccgcatccttatgatgctcgtcctgcttgcaatgtgggaggtggctcgagcggtggcagcggtggctctggtggtactagcacctctggtcgttccgctaacccacgtggcggcggttctgacatccagatgacccagagccccagcagcctgtctgctagcgtgggcgacagagtgaccatcacctgtagagccagccagagcatcagcagctacctgaactggtatcagcagaagcccggcaaggcccccaaactgctgatctacgccgccagctctctgcagtctggcgtgcccagcagattttccggcagcggctctggcaccgacttcaccctgaccatcagctccctgcagcccgaggacttcgccacctactactgccagcaggacaacggctaccccagcacctttggcggaggtaccaaggtggaaatcaagcgttgtgaggccactcacaagacatcaacttcacccattgtcaagagcttcaacaggaatgagtgt

SEQ ID NO: 943 - protein, 157 aa, Artificial Sequence
  Synthetic
QGQSGSPCHPHPYDARPACNVGGGSSGGSGGSGGTSTSGRSANPRGGGSDIQMTQSPSSLSASVGDRVTITCRASQSISSYLNWYQQKPGKAPKLLIYAASSLQSGVPSRFSGSGSGTDFTLTISSLQPEDFATYYCQQDNGYPSTFGGGTKVEIKR

SEQ ID NO: 944 - DNA, 516 bp, Artificial Sequence
  Synthetic
ccgtgccatccgcatccttatgatgctcgtcctgcttgcaatgtgggaggtggctcgagcggtggcagcggtggctctggtggtactagcacctctggtcgttccgctaacccacgtggcggcggttctgacatccagatgacccagagccccagcagcctgtctgctagcgtgggcgacagagtgaccatcacctgtagagccagccagagcatcagcagctacctgaactggtatcagcagaagcccggcaaggcccccaaactgctgatctacgccgccagctctctgcagtctggcgtgcccagcagattttccggcagcggctctggcaccgacttcaccctgaccatcagctccctgcagcccgaggacttcgccacctactactgccagcaggacaacggctaccccagcacctttggcggaggtaccaaggtggaaatcaagcgttgtgaggccactcacaagacatcaacttcacccattgtcaagagcttcaacaggaatgagtgt

SEQ ID NO: 945 - protein, 151 aa, Artificial Sequence
  Synthetic
PCHPHPYDARPACNVGGGSSGGSGGSGGTSTSGRSANPRGGGSDIQMTQSPSSLSASVGDRVTITCRASQSISSYLNWYQQKPGKAPKLLIYAASSLQSGVPSRFSGSGSGTDFTLTISSLQPEDFATYYCQQDNGYPSTFGGGTKVEIKR

SEQ ID NO: 946 - DNA, 534 bp, Artificial Sequence
  Synthetic
caaggtcagtctggatccccgtgccatccgcatccttatgatgctcgtccttattgcgctgtgggaggtggctcgagcggtggcagcggtggctctggtggtactagcacctctggtcgttccgctaacccacgtggcggcggttctgacatccagatgacccagagccccagcagcctgtctgctagcgtgggcgacagagtgaccatcacctgtagagccagccagagcatcagcagctacctgaactggtatcagcagaagcccggcaaggcccccaaactgctgatctacgccgccagctctctgcagtctggcgtgcccagcagattttccggcagcggctctggcaccgacttcaccctgaccatcagctccctgcagcccgaggacttcgccacctactactgccagcaggacaacggctaccccagcacctttggcggaggtaccaaggtggaaatcaagcgttgtgaggccactcacaagacatcaacttcacccattgtcaagagcttcaacaggaatgagtgt

SEQ ID NO: 947 - protein, 157 aa, Artificial Sequence
  Synthetic
QGQSGSPCHPHPYDARPYCAVGGGSSGGSGGSGGTSTSGRSANPRGGGSDIQMTQSPSSLSASVGDRVTITCRASQSISSYLNWYQQKPGKAPKLLIYAASSLQSGVPSRFSGSGSGTDFTLTISSLQPEDFATYYCQQDNGYPSTFGGGTKVEIKR

SEQ ID NO: 948 - DNA, 516 bp, Artificial Sequence
  Synthetic
ccgtgccatccgcatccttatgatgctcgtccttattgcgctgtgggaggtggctcgagcggtggcagcggtggctctggtggtactagcacctctggtcgttccgctaacccacgtggcggcggttctgacatccagatgacccagagccccagcagcctgtctgctagcgtgggcgacagagtgaccatcacctgtagagccagccagagcatcagcagctacctgaactggtatcagcagaagcccggcaaggcccccaaactgctgatctacgccgccagctctctgcagtctggcgtgcccagcagattttccggcagcggctctggcaccgacttcaccctgaccatcagctccctgcagcccgaggacttcgccacctactactgccagcaggacaacggctaccccagcacctttggcggaggtaccaaggtggaaatcaagcgttgtgaggccactcacaagacatcaacttcacccattgtcaagagcttcaacaggaatgagtgt

SEQ ID NO: 949 - protein, 151 aa, Artificial Sequence
  Synthetic
PCHPHPYDARPYCAVGGGSSGGSGGSGGTSTSGRSANPRGGGSDIQMTQSPSSLSASVGDRVTITCRASQSISSYLNWYQQKPGKAPKLLIYAASSLQSGVPSRFSGSGSGTDFTLTISSLQPEDFATYYCQQDNGYPSTFGGGTKVEIKR

SEQ ID NO: 950 - DNA, 534 bp, Artificial Sequence
  Synthetic
caaggtcagtctggatccccgtgccatgcgcatccttatgatgctcgtccttattgcaatgtgggaggtggctcgagcggtggcagcggtggctctggtggtactagcacctctggtcgttccgctaacccacgtggcggcggttctgacatccagatgacccagagccccagcagcctgtctgctagcgtgggcgacagagtgaccatcacctgtagagccagccagagcatcagcagctacctgaactggtatcagcagaagcccggcaaggcccccaaactgctgatctacgccgccagctctctgcagtctggcgtgcccagcagattttccggcagcggctctggcaccgacttcaccctgaccatcagctccctgcagcccgaggacttcgccacctactactgccagcaggacaacggctaccccagcacctttggcggaggtaccaaggtggaaatcaagcgttgtgaggccactcacaagacatcaacttcacccattgtcaagagcttcaacaggaatgagtgt

SEQ ID NO: 951 - protein, 157 aa, Artificial Sequence
  Synthetic
QGQSGSPCHAHPYDARPYCNVGGGSSGGSGGSGGTSTSGRSANPRGGGSDIQMTQSPSSLSASVGDRVTITCRASQSISSYLNWYQQKPGKAPKLLIYAASSLQSGVPSRFSGSGSGTDFTLTISSLQPEDFATYYCQQDNGYPSTFGGGTKVEIKR

SEQ ID NO: 952 - DNA, 516 bp, Artificial Sequence
  Synthetic
ccgtgccatgcgcatccttatgatgctcgtccttattgcaatgtgggaggtggctcgagcggtggcagcggtggctctggtggtactagcacctctggtcgttccgctaacccacgtggcggcggttctgacatccagatgacccagagccccagcagcctgtctgctagcgtgggcgacagagtgaccatcacctgtagagccagccagagcatcagcagctacctgaactggtatcagcagaagcccggcaaggcccccaaactgctgatctacgccgccagctctctgcagtctggcgtgcccagcagattttccggcagcggctctggcaccgacttcaccctgaccatcagctccctgcagcccgaggacttcgccacctactactgccagcaggacaacggctaccccagcacctttggcggaggtaccaaggtggaaatcaagcgttgtgaggccactcacaagacatcaacttcacccattgtcaagagcttcaacaggaatgagtgt

SEQ ID NO: 953 - protein, 151 aa, Artificial Sequence
  Synthetic
PCHAHPYDARPYCNVGGGSSGGSGGSGGTSTSGRSANPRGGGSDIQMTQSPSSLSASVGDRVTITCRASQSISSYLNWYQQKPGKAPKLLIYAASSLQSGVPSRFSGSGSGTDFTLTISSLQPEDFATYYCQQDNGYPSTFGGGTKVEIKR

SEQ ID NO: 954 - DNA, 534 bp, Artificial Sequence
  Synthetic
caaggtcagtctggatccccgtgccatccgcatccttatgatgctcgtgcttattgcaatgtgggaggtggctcgagcggtggcagcggtggctctggtggtactagcacctctggtcgttccgctaacccacgtggcggcggttctgacatccagatgacccagagccccagcagcctgtctgctagcgtgggcgacagagtgaccatcacctgtagagccagccagagcatcagcagctacctgaactggtatcagcagaagcccggcaaggcccccaaactgctgatctacgccgccagctctctgcagtctggcgtgcccagcagattttccggcagcggctctggcaccgacttcaccctgaccatcagctccctgcagcccgaggacttcgccacctactactgccagcaggacaacggctaccccagcacctttggcggaggtaccaaggtggaaatcaagcgttgtgaggccactcacaagacatcaacttcacccattgtcaagagcttcaacaggaatgagtgt

SEQ ID NO: 955 - protein, 157 aa, Artificial Sequence
  Synthetic
QGQSGSPCHPHPYDARAYCNVGGGSSGGSGGSGGTSTSGRSANPRGGGSDIQMTQSPSSLSASVGDRVTITCRASQSISSYLNWYQQKPGKAPKLLIYAASSLQSGVPSRFSGSGSGTDFTLTISSLQPEDFATYYCQQDNGYPSTFGGGTKVEIKR

SEQ ID NO: 956 - DNA, 516 bp, Artificial Sequence
  Synthetic
ccgtgccatccgcatccttatgatgctcgtgcttattgcaatgtgggaggtggctcgagcggtggcagcggtggctctggtggtactagcacctctggtcgttccgctaacccacgtggcggcggttctgacatccagatgacccagagccccagcagcctgtctgctagcgtgggcgacagagtgaccatcacctgtagagccagccagagcatcagcagctacctgaactggtatcagcagaagcccggcaaggcccccaaactgctgatctacgccgccagctctctgcagtctggcgtgcccagcagattttccggcagcggctctggcaccgacttcaccctgaccatcagctccctgcagcccgaggacttcgccacctactactgccagcaggacaacggctaccccagcacctttggcggaggtaccaaggtggaaatcaagcgttgtgaggccactcacaagacatcaacttcacccattgtcaagagcttcaacaggaatgagtgt

SEQ ID NO: 957 - protein, 151 aa, Artificial Sequence
  Synthetic
PCHPHPYDARAYCNVGGGSSGGSGGSGGTSTSGRSANPRGGGSDIQMTQSPSSLSASVGDRVTITCRASQSISSYLNWYQQKPGKAPKLLIYAASSLQSGVPSRFSGSGSGTDFTLTISSLQPEDFATYYCQQDNGYPSTFGGGTKVEIKR

SEQ ID NO: 958 - DNA, 492 bp, Artificial Sequence
  Synthetic
caaggtcagtctggatccggaggtggctcgagcggtggcagcggtggctctggtggtattagcagtggtctgttaagcggtcgtagcgataatcatggcggttctgacatccagatgacccagagccccagcagcctgtctgctagcgtgggcgacagagtgaccatcacctgtagagccagccagagcatcagcagctacctgaactggtatcagcagaagcccggcaaggcccccaaactgctgatctacgccgccagctctctgcagtctggcgtgcccagcagattttccggcagcggctctggcaccgacttcaccctgaccatcagctccctgcagcccgaggacttcgccacctactactgccagcaggacaacggctaccccagcacctttggcggaggtaccaaggtggaaatcaagcgttgtgaggccactcacaagacatcaacttcacccattgtcaagagcttcaacaggaatgagtgt

SEQ ID NO: 959 - protein, 158 aa, Artificial Sequence
  Synthetic
QGQSGSLCEVLMLLQHPWCMGGGGSSGGSGGSGGISSGLLSGRSDNHGGSDIQMTQSPSSLSASVGDRVTITCRASQSISSYLNWYQQKPGKAPKLLIYAASSLQSGVPSRFSGSGSGTDFTLTISSLQPEDFATYYCQQDNGYPSTFGGGTKVEIKR

SEQ ID NO: 960 - DNA, 474 bp, Artificial Sequence
  Synthetic
ggaggtggctcgagcggtggcagcggtggctctggtggtattagcagtggtctgttaagcggtcgtagcgataatcatggcggttctgacatccagatgacccagagccccagcagcctgtctgctagcgtgggcgacagagtgaccatcacctgtagagccagccagagcatcagcagctacctgaactggtatcagcagaagcccggcaaggcccccaaactgctgatctacgccgccagctctctgcagtctggcgtgcccagcagattttccggcagcggctctggcaccgacttcaccctgaccatcagctccctgcagcccgaggacttcgccacctactactgccagcaggacaacggctaccccagcacctttggcggaggtaccaaggtggaaatcaagcgttgtgaggccactcacaagacatcaacttcacccattgtcaagagcttcaacaggaatgagtgt

SEQ ID NO: 961 - protein, 152 aa, Artificial Sequence
  Synthetic
LCEVLMLLQHPWCMGGGGSSGGSGGSGGISSGLLSGRSDNHGGSDIQMTQSPSSLSASVGDRVTITCRASQSISSYLNWYQQKPGKAPKLLIYAASSLQSGVPSRFSGSGSGTDFTLTISSLQPEDFATYYCQQDNGYPSTFGGGTKVEIKR

SEQ ID NO: 962 - protein, 158 aa, Artificial Sequence
  Synthetic
QGQSGSIACRHFMEQLPFCHHGGGSSGGSGGSGGISSGLLSGRSDNHGGSDIQMTQSPSSLSASVGDRVTITCRASQSISSYLNWYQQKPGKAPKLLIYAASSLQSGVPSRFSGSGSGTDFTLTISSLQPEDFATYYCQQDNGYPSTFGGGTKVEIKR

SEQ ID NO: 963 - protein, 152 aa, Artificial Sequence
  Synthetic
IACRHFMEQLPFCHHGGGSSGGSGGSGGISSGLLSGRSDNHGGSDIQMTQSPSSLSASVGDRVTITCRASQSISSYLNWYQQKPGKAPKLLIYAASSLQSGVPSRFSGSGSGTDFTLTISSLQPEDFATYYCQQDNGYPSTFGGGTKVEIKR

SEQ ID NO: 964 - DNA, 492 bp, Artificial Sequence; identical to SEQ ID NO: 958
  Synthetic

SEQ ID NO: 965 - protein, 158 aa, Artificial Sequence
  Synthetic
QGQSGSILYCDSWGAGCLTRPGGGSSGGSGGSGGISSGLLSGRSDNHGGSDIQMTQSPSSLSASVGDRVTITCRASQSISSYLNWYQQKPGKAPKLLIYAASSLQSGVPSRFSGSGSGTDFTLTISSLQPEDFATYYCQQDNGYPSTFGGGTKVEIKR

SEQ ID NO: 966 - DNA, 474 bp, Artificial Sequence; identical to SEQ ID NO: 960
  Synthetic

SEQ ID NO: 967 - protein, 152 aa, Artificial Sequence
  Synthetic
ILYCDSWGAGCLTRPGGGSSGGSGGSGGISSGLLSGRSDNHGGSDIQMTQSPSSLSASVGDRVTITCRASQSISSYLNWYQQKPGKAPKLLIYAASSLQSGVPSRFSGSGSGTDFTLTISSLQPEDFATYYCQQDNGYPSTFGGGTKVEIKR

SEQ ID NO: 968 - DNA, 492 bp, Artificial Sequence; identical to SEQ ID NO: 958
  Synthetic

SEQ ID NO: 969 - protein, 158 aa, Artificial Sequence
  Synthetic
QGQSGSGIALCPSHFCQLPQTGGGSSGGSGGSGGISSGLLSGRSDNHGGSDIQMTQSPSSLSASVGDRVTITCRASQSISSYLNWYQQKPGKAPKLLIYAASSLQSGVPSRFSGSGSGTDFTLTISSLQPEDFATYYCQQDNGYPSTFGGGTKVEIKR

SEQ ID NO: 970 - DNA, 474 bp, Artificial Sequence; identical to SEQ ID NO: 960
  Synthetic

SEQ ID NO: 971 - protein, 152 aa, Artificial Sequence
  Synthetic
GIALCPSHFCQLPQTGGGSSGGSGGSGGISSGLLSGRSDNHGGSDIQMTQSPSSLSASVGDRVTITCRASQSISSYLNWYQQKPGKAPKLLIYAASSLQSGVPSRFSGSGSGTDFTLTISSLQPEDFATYYCQQDNGYPSTFGGGTKVEIKR

SEQ ID NO: 972 - DNA, 492 bp, Artificial Sequence; identical to SEQ ID NO: 958
  Synthetic

SEQ ID NO: 973 - protein, 158 aa, Artificial Sequence
  Synthetic
QGQSGSPCHPHPYDARPYCNVGGGSSGGSGGSGGISSGLLSGRSDNHGGSDIQMTQSPSSLSASVGDRVTITCRASQSISSYLNWYQQKPGKAPKLLIYAASSLQSGVPSRFSGSGSGTDFTLTISSLQPEDFATYYCQQDNGYPSTFGGGTKVEIKR

SEQ ID NO: 974 - DNA, 474 bp, Artificial Sequence; identical to SEQ ID NO: 960
  Synthetic

SEQ ID NO: 975 - protein, 152 aa, Artificial Sequence
  Synthetic
PCHPHPYDARPYCNVGGGSSGGSGGSGGISSGLLSGRSDNHGGSDIQMTQSPSSLSASVGDRVTITCRASQSISSYLNWYQQKPGKAPKLLIYAASSLQSGVPSRFSGSGSGTDFTLTISSLQPEDFATYYCQQDNGYPSTFGGGTKVEIKR

SEQ ID NO: 976 - protein, 158 aa, Artificial Sequence
  Synthetic
QGQSGSPCYWHPFFAYRYCNTGGGSSGGSGGSGGISSGLLSGRSDNHGGSDIQMTQSPSSLSASVGDRVTITCRASQSISSYLNWYQQKPGKAPKLLIYAASSLQSGVPSRFSGSGSGTDFTLTISSLQPEDFATYYCQQDNGYPSTFGGGTKVEIKR

SEQ ID NO: 977 - protein, 152 aa, Artificial Sequence
  Synthetic
PCYWHPFFAYRYCNTGGGSSGGSGGSGGISSGLLSGRSDNHGGSDIQMTQSPSSLSASVGDRVTITCRASQSISSYLNWYQQKPGKAPKLLIYAASSLQSGVPSRFSGSGSGTDFTLTISSLQPEDFATYYCQQDNGYPSTFGGGTKVEIKR

SEQ ID NO: 978 - protein, 158 aa, Artificial Sequence
  Synthetic
QGQSGSVCYYMDWLGRNWCSSGGGSSGGSGGSGGISSGLLSGRSDNHGGSDIQMTQSPSSLSASVGDRVTITCRASQSISSYLNWYQQKPGKAPKLLIYAASSLQSGVPSRFSGSGSGTDFTLTISSLQPEDFATYYCQQDNGYPSTFGGGTKVEIKR

SEQ ID NO: 979 - protein, 152 aa, Artificial Sequence
  Synthetic
VCYYMDWLGRNWCSSGGGSSGGSGGSGGISSGLLSGRSDNHGGSDIQMTQSPSSLSASVGDRVTITCRASQSISSYLNWYQQKPGKAPKLLIYAASSLQSGVPSRFSGSGSGTDFTLTISSLQPEDFATYYCQQDNGYPSTFGGGTKVEIKR

SEQ ID NO: 980 - DNA, 492 bp, Artificial Sequence; identical to SEQ ID NO: 958
  Synthetic

SEQ ID NO: 981 - protein, 158 aa, Artificial Sequence
  Synthetic
QGQSGSYLPCHFVPIGACNNKGGGSSGGSGGSGGISSGLLSGRSDNHGGSDIQMTQSPSSLSASVGDRVTITCRASQSISSYLNWYQQKPGKAPKLLIYAASSLQSGVPSRFSGSGSGTDFTLTISSLQPEDFATYYCQQDNGYPSTFGGGTKVEIKR

SEQ ID NO: 982 - DNA, 474 bp, Artificial Sequence; identical to SEQ ID NO: 960
  Synthetic

SEQ ID NO: 983 - protein, 152 aa, Artificial Sequence
  Synthetic
YLPCHFVPIGACNNKGGGSSGGSGGSGGISSGLLSGRSDNHGGSDIQMTQSPSSLSASVGDRVTITCRASQSISSYLNWYQQKPGKAPKLLIYAASSLQSGVPSRFSGSGSGTDFTLTISSLQPEDFATYYCQQDNGYPSTFGGGTKVEIKR

SEQ ID NO: 984 - DNA, 492 bp, Artificial Sequence; identical to SEQ ID NO: 958
  Synthetic

SEQ ID NO: 985 - protein, 158 aa, Artificial Sequence
  Synthetic
QGQSGSIFCHMGVVVPQCANYGGGSSGGSGGSGGISSGLLSGRSDNHGGSDIQMTQSPSSLSASVGDRVTITCRASQSISSYLNWYQQKPGKAPKLLIYAASSLQSGVPSRFSGSGSGTDFTLTISSLQPEDFATYYCQQDNGYPSTFGGGTKVEIKR

SEQ ID NO: 986 - DNA, 474 bp, Artificial Sequence; identical to SEQ ID NO: 960
  Synthetic

SEQ ID NO: 987 - protein, 152 aa, Artificial Sequence
  Synthetic
IFCHMGVVVPQCANYGGGSSGGSGGSGGISSGLLSGRSDNHGGSDIQMTQSPSSLSASVGDRVTITCRASQSISSYLNWYQQKPGKAPKLLIYAASSLQSGVPSRFSGSGSGTDFTLTISSLQPEDFATYYCQQDNGYPSTFGGGTKVEIKR

SEQ ID NO: 988 - DNA, 492 bp, Artificial Sequence; identical to SEQ ID NO: 958
  Synthetic

SEQ ID NO: 989 - protein, 158 aa, Artificial Sequence
  Synthetic
QGQSGSPCHPHAYDARPYCNVGGGSSGGSGGSGGISSGLLSGRSDNHGGSDIQMTQSPSSLSASVGDRVTITCRASQSISSYLNWYQQKPGKAPKLLIYAASSLQSGVPSRFSGSGSGTDFTLTISSLQPEDFATYYCQQDNGYPSTFGGGTKVEIKR

SEQ ID NO: 990 - DNA, 474 bp, Artificial Sequence; identical to SEQ ID NO: 960
  Synthetic

SEQ ID NO: 991 - protein, 152 aa, Artificial Sequence
  Synthetic
PCHPHAYDARPYCNVGGGSSGGSGGSGGISSGLLSGRSDNHGGSDIQMTQSPSSLSASVGDRVTITCRASQSISSYLNWYQQKPGKAPKLLIYAASSLQSGVPSRFSGSGSGTDFTLTISSLQPEDFATYYCQQDNGYPSTFGGGTKVEIKR

SEQ ID NO: 992 - protein, 158 aa, Artificial Sequence
  Synthetic
QGQSGSPCHPHPADARPYCNVGGGSSGGSGGSGGISSGLLSGRSDNHGGSDIQMTQSPSSLSASVGDRVTITCRASQSISSYLNWYQQKPGKAPKLLIYAASSLQSGVPSRFSGSGSGTDFTLTISSLQPEDFATYYCQQDNGYPSTFGGGTKVEIKR

SEQ ID NO: 993 - protein, 152 aa, Artificial Sequence
  Synthetic
PCHPHPADARPYCNVGGGSSGGSGGSGGISSGLLSGRSDNHGGSDIQMTQSPSSLSASVGDRVTITCRASQSISSYLNWYQQKPGKAPKLLIYAASSLQSGVPSRFSGSGSGTDFTLTISSLQPEDFATYYCQQDNGYPSTFGGGTKVEIKR

SEQ ID NO: 994 - protein, 158 aa, Artificial Sequence
  Synthetic
QGQSGSPCHPHPYAARPYCNVGGGSSGGSGGSGGISSGLLSGRSDNHGGSDIQMTQSPSSLSASVGDRVTITCRASQSISSYLNWYQQKPGKAPKLLIYAASSLQSGVPSRFSGSGSGTDFTLTISSLQPEDFATYYCQQDNGYPSTFGGGTKVEIKR

SEQ ID NO: 995 - protein, 152 aa, Artificial Sequence
  Synthetic
PCHPHPYAARPYCNVGGGSSGGSGGSGGISSGLLSGRSDNHGGSDIQMTQSPSSLSASVGDRVTITCRASQSISSYLNWYQQKPGKAPKLLIYAASSLQSGVPSRFSGSGSGTDFTLTISSLQPEDFATYYCQQDNGYPSTFGGGTKVEIKR

SEQ ID NO: 996 - DNA, 495 bp, Artificial Sequence
  Synthetic
caaggtcagtctggatccggaggtggctcgagcggtggcagcggtgctgtgggtctcctggctcccccgggcggcctgtccggccgcagcgataatcatggcggttctgacatccagatgacccagagccccagcagcctgtctgctagcgtgggcgacagagtgaccatcacctgtagagccagccagagcatcagcagctacctgaactggtatcagcagaagcccggcaaggcccccaaactgctgatctacgccgccagctctctgcagtctggcgtgcccagcagattttccggcagcggctctggcaccgacttcaccctgaccatcagctccctgcagcccgaggacttcgccacctactactgccagcaggacaacggctaccccagcacctttggcggaggtaccaaggtggaaatcaagcgttgtgaggccactcacaagacatcaacttcacccattgtcaagagcttcaacaggaatgagtgt

SEQ ID NO: 997 - protein, 159 aa, Artificial Sequence
  Synthetic
QGQSGSLCEVLMLLQHPWCMGGGGSSGGSGAVGLLAPPGGLSGRSDNHGGSDIQMTQSPSSLSASVGDRVTITCRASQSISSYLNWYQQKPGKAPKLLIYAASSLQSGVPSRFSGSGSGTDFTLTISSLQPEDFATYYCQQDNGYPSTFGGGTKVEIKR

SEQ ID NO: 998 - DNA, 477 bp, Artificial Sequence
  Synthetic
ggaggtggctcgagcggtggcagcggtgctgtgggtctcctggctcccccgggcggcctgtccggccgcagcgataatcatggcggttctgacatccagatgacccagagccccagcagcctgtctgctagcgtgggcgacagagtgaccatcacctgtagagccagccagagcatcagcagctacctgaactggtatcagcagaagcccggcaaggcccccaaactgctgatctacgccgccagctctctgcagtctggcgtgcccagcagattttccggcagcggctctggcaccgacttcaccctgaccatcagctccctgcagcccgaggacttcgccacctactactgccagcaggacaacggctaccccagcacctttggcggaggtaccaaggtggaaatcaagcgttgtgaggccactcacaagacatcaacttcacccattgtcaagagcttcaacaggaatgagtgt

SEQ ID NO: 999 - protein, 153 aa, Artificial Sequence
  Synthetic
LCEVLMLLQHPWCMGGGGSSGGSGAVGLLAPPGGLSGRSDNHGGSDIQMTQSPSSLSASVGDRVTITCRASQSISSYLNWYQQKPGKAPKLLIYAASSLQSGVPSRFSGSGSGTDFTLTISSLQPEDFATYYCQQDNGYPSTFGGGTKVEIKR

SEQ ID NO: 1000 - DNA, 495 bp, Artificial Sequence
  Synthetic
caaggtcagtctggatccggaggtggctcgagcggtggcagcggtgctgtgggtctcctggctcccccgggcggcctgtccggccgcagcgataatcatggcggttctgacatccagatgacccagagccccagcagcctgtctgctagcgtgggcgacagagtgaccatcacctgtagagccagccagagcatcagcagctacctgaactggtatcagcagaagcccggcaaggcccccaaactgctgatctacgccgccagctctctgcagtctggcgtgcccagcagattttccggcagcggctctggcaccgacttcaccctgaccatcagctccctgcagcccgaggacttcgccacctactactgccagcaggacaacggctaccccagcacctttggcggaggtaccaaggtggaaatcaagcgttgcgaagtcacccatcagggcctgagctcgcccgtcacaaagagcttcaacaggggagagtgt

SEQ ID NO: 1001 - protein, 159 aa, Artificial Sequence
  Synthetic
QGQSGSILYCDSWGAGCLTRPGGGSSGGSGAVGLLAPPGGLSGRSDNHGGSDIQMTQSPSSLSASVGDRVTITCRASQSISSYLNWYQQKPGKAPKLLIYAASSLQSGVPSRFSGSGSGTDFTLTISSLQPEDFATYYCQQDNGYPSTFGGGTKVEIKR

SEQ ID NO: 1002 - DNA, 477 bp, Artificial Sequence
  Synthetic
ggaggtggctcgagcggtggcagcggtgctgtgggtctcctggctcccccgggcggcctgtccggccgcagcgataatcatggcggttctgacatccagatgacccagagccccagcagcctgtctgctagcgtgggcgacagagtgaccatcacctgtagagccagccagagcatcagcagctacctgaactggtatcagcagaagcccggcaaggcccccaaactgctgatctacgccgccagctctctgcagtctggcgtgcccagcagattttccggcagcggctctggcaccgacttcaccctgaccatcagctccctgcagcccgaggacttcgccacctactactgccagcaggacaacggctaccccagcacctttggcggaggtaccaaggtggaaatcaagcgttgcgaagtcacccatcagggcctgagctcgcccgtcacaaagagcttcaacaggggagagtgt

SEQ ID NO: 1003 - protein, 153 aa, Artificial Sequence
  Synthetic
ILYCDSWGAGCLTRPGGGSSGGSGAVGLLAPPGGLSGRSDNHGGSDIQMTQSPSSLSASVGDRVTITCRASQSISSYLNWYQQKPGKAPKLLIYAASSLQSGVPSRFSGSGSGTDFTLTISSLQPEDFATYYCQQDNGYPSTFGGGTKVEIKR

SEQ ID NO: 1004 - DNA, 495 bp, Artificial Sequence; identical to SEQ ID NO: 1000
  Synthetic

SEQ ID NO: 1005 - protein, 159 aa, Artificial Sequence
  Synthetic
QGQSGSGIALCPSHFCQLPQTGGGSSGGSGAVGLLAPPGGLSGRSDNHGGSDIQMTQSPSSLSASVGDRVTITCRASQSISSYLNWYQQKPGKAPKLLIYAASSLQSGVPSRFSGSGSGTDFTLTISSLQPEDFATYYCQQDNGYPSTFGGGTKVEIKR

SEQ ID NO: 1006 - DNA, 477 bp, Artificial Sequence; identical to SEQ ID NO: 1002
  Synthetic

SEQ ID NO: 1007 - protein, 153 aa, Artificial Sequence
  Synthetic
GIALCPSHFCQLPQTGGGSSGGSGAVGLLAPPGGLSGRSDNHGGSDIQMTQSPSSLSASVGDRVTITCRASQSISSYLNWYQQKPGKAPKLLIYAASSLQSGVPSRFSGSGSGTDFTLTISSLQPEDFATYYCQQDNGYPSTFGGGTKVEIKR

SEQ ID NO: 1008 - DNA, 495 bp, Artificial Sequence; identical to SEQ ID NO: 1000
  Synthetic

SEQ ID NO: 1009 - protein, 159 aa, Artificial Sequence
  Synthetic
QGQSGSYLPCHFVPIGACNNKGGGSSGGSGAVGLLAPPGGLSGRSDNHGGSDIQMTQSPSSLSASVGDRVTITCRASQSISSYLNWYQQKPGKAPKLLIYAASSLQSGVPSRFSGSGSGTDFTLTISSLQPEDFATYYCQQDNGYPSTFGGGTKVEIKR

SEQ ID NO: 1010 - DNA, 477 bp, Artificial Sequence; identical to SEQ ID NO: 1002
  Synthetic

SEQ ID NO: 1011 - protein, 153 aa, Artificial Sequence
  Synthetic
YLPCHFVPIGACNNKGGGSSGGSGAVGLLAPPGGLSGRSDNHGGSDIQMTQSPSSLSASVGDRVTITCRASQSISSYLNWYQQKPGKAPKLLIYAASSLQSGVPSRFSGSGSGTDFTLTISSLQPEDFATYYCQQDNGYPSTFGGGTKVEIKR

SEQ ID NO: 1012 - DNA, 495 bp, Artificial Sequence; identical to SEQ ID NO: 996
  Synthetic

SEQ ID NO: 1013 - protein, 159 aa, Artificial Sequence
  Synthetic
QGQSGSIFCHMGVVVPQCANYGGGSSGGSGAVGLLAPPGGLSGRSDNHGGSDIQMTQSPSSLSASVGDRVTITCRASQSISSYLNWYQQKPGKAPKLLIYAASSLQSGVPSRFSGSGSGTDFTLTISSLQPEDFATYYCQQDNGYPSTFGGGTKVEIKR

SEQ ID NO: 1014 - DNA, 477 bp, Artificial Sequence; identical to SEQ ID NO: 998
  Synthetic

SEQ ID NO: 1015 - protein, 153 aa, Artificial Sequence
  Synthetic
IFCHMGVVVPQCANYGGGSSGGSGAVGLLAPPGGLSGRSDNHGGSDIQMTQSPSSLSASVGDRVTITCRASQSISSYLNWYQQKPGKAPKLLIYAASSLQSGVPSRFSGSGSGTDFTLTISSLQPEDFATYYCQQDNGYPSTFGGGTKVEIKR

SEQ ID NO: 1016 - DNA, 495 bp, Artificial Sequence; identical to SEQ ID NO: 996
  Synthetic

SEQ ID NO: 1017 - protein, 159 aa, Artificial Sequence
  Synthetic
QGQSGSPCHPHAYDARPYCNVGGGSSGGSGAVGLLAPPGGLSGRSDNHGGSDIQMTQSPSSLSASVGDRVTITCRASQSISSYLNWYQQKPGKAPKLLIYAASSLQSGVPSRFSGSGSGTDFTLTISSLQPEDFATYYCQQDNGYPSTFGGGTKVEIKR

SEQ ID NO: 1018 - DNA, 477 bp, Artificial Sequence; identical to SEQ ID NO: 998
  Synthetic

SEQ ID NO: 1019 - protein, 153 aa, Artificial Sequence
  Synthetic
PCHPHAYDARPYCNVGGGSSGGSGAVGLLAPPGGLSGRSDNHGGSDIQMTQSPSSLSASVGDRVTITCRASQSISSYLNWYQQKPGKAPKLLIYAASSLQSGVPSRFSGSGSGTDFTLTISSLQPEDFATYYCQQDNGYPSTFGGGTKVEIKR

SEQ ID NO: 1020 - protein, 153 aa, Artificial Sequence
  Synthetic
QGQSGSGIALCPSHFCQLPQTGGGSSGGSGGSGGLSGRSDNHGGSDIQMTQSPSSLSASVGDRVTITCRASQSISSYLNWYQQKPGKAPKLLIYAASSLQSGVPSRFSGSGSGTDFTLTISSLQPEDFATYYCQQDNGYPSTFGGGTKVEIKR

SEQ ID NO: 1021 - protein, 147 aa, Artificial Sequence
  Synthetic
GIALCPSHFCQLPQTGGGSSGGSGGSGGLSGRSDNHGGSDIQMTQSPSSLSASVGDRVTITCRASQSISSYLNWYQQKPGKAPKLLIYAASSLQSGVPSRFSGSGSGTDFTLTISSLQPEDFATYYCQQDNGYPSTFGGGTKVEIKR

SEQ ID NO: 1022 - protein, 153 aa, Artificial Sequence
  Synthetic
QGQSGSGIALCPSHFCQLPQTGGGSSGGSGGSGGLSGRSGNHGGSDIQMTQSPSSLSASVGDRVTITCRASQSISSYLNWYQQKPGKAPKLLIYAASSLQSGVPSRFSGSGSGTDFTLTISSLQPEDFATYYCQQDNGYPSTFGGGTKVEIKR

SEQ ID NO: 1023 - protein, 147 aa, Artificial Sequence
  Synthetic
GIALCPSHFCQLPQTGGGSSGGSGGSGGLSGRSGNHGGSDIQMTQSPSSLSASVGDRVTITCRASQSISSYLNWYQQKPGKAPKLLIYAASSLQSGVPSRFSGSGSGTDFTLTISSLQPEDFATYYCQQDNGYPSTFGGGTKVEIKR

SEQ ID NO: 1024 - protein, 153 aa, Artificial Sequence
  Synthetic
QGQSGSGIALCPSHFCQLPQTGGGSSGGSGGSGGISSGLLSSGGSDIQMTQSPSSLSASVGDRVTITCRASQSISSYLNWYQQKPGKAPKLLIYAASSLQSGVPSRFSGSGSGTDFTLTISSLQPEDFATYYCQQDNGYPSTFGGGTKVEIKR

SEQ ID NO: 1025 - protein, 147 aa, Artificial Sequence
  Synthetic
GIALCPSHFCQLPQTGGGSSGGSGGSGGISSGLLSSGGSDIQMTQSPSSLSASVGDRVTITCRASQSISSYLNWYQQKPGKAPKLLIYAASSLQSGVPSRFSGSGSGTDFTLTISSLQPEDFATYYCQQDNGYPSTFGGGTKVEIKR

SEQ ID NO: 1026 - protein, 153 aa, Artificial Sequence
  Synthetic
QGQSGSGIALCPSHFCQLPQTGGGSSGGSGGSGGQNQALRMAGGSDIQMTQSPSSLSASVGDRVTITCRASQSISSYLNWYQQKPGKAPKLLIYAASSLQSGVPSRFSGSGSGTDFTLTISSLQPEDFATYYCQQDNGYPSTFGGGTKVEIKR

SEQ ID NO: 1027 - protein, 147 aa, Artificial Sequence
  Synthetic
GIALCPSHFCQLPQTGGGSSGGSGGSGGQNQALRMAGGSDIQMTQSPSSLSASVGDRVTITCRASQSISSYLNWYQQKPGKAPKLLIYAASSLQSGVPSRFSGSGSGTDFTLTISSLQPEDFATYYCQQDNGYPSTFGGGTKVEIKR

SEQ ID NO: 1028 - protein, 155 aa, Artificial Sequence
  Synthetic
QGQSGSGIALCPSHFCQLPQTGGGSSGGSGGSGGVHMPLGFLGPGGSDIQMTQSPSSLSASVGDRVTITCRASQSISSYLNWYQQKPGKAPKLLIYAASSLQSGVPSRFSGSGSGTDFTLTISSLQPEDFATYYCQQDNGYPSTFGGGTKVEIKR

SEQ ID NO: 1029 - protein, 149 aa, Artificial Sequence
  Synthetic
GIALCPSHFCQLPQTGGGSSGGSGGSGGVHMPLGFLGPGGSDIQMTQSPSSLSASVGDRVTITCRASQSISSYLNWYQQKPGKAPKLLIYAASSLQSGVPSRFSGSGSGTDFTLTISSLQPEDFATYYCQQDNGYPSTFGGGTKVEIKR

SEQ ID NO: 1030 - protein, 153 aa, Artificial Sequence
  Synthetic
QGQSGSGIALCPSHFCQLPQTGGGSSGGSGGSGGAVGLLAPPGGSDIQMTQSPSSLSASVGDRVTITCRASQSISSYLNWYQQKPGKAPKLLIYAASSLQSGVPSRFSGSGSGTDFTLTISSLQPEDFATYYCQQDNGYPSTFGGGTKVEIKR

SEQ ID NO: 1031 - protein, 147 aa, Artificial Sequence
  Synthetic
GIALCPSHFCQLPQTGGGSSGGSGGSGGAVGLLAPPGGSDIQMTQSPSSLSASVGDRVTITCRASQSISSYLNWYQQKPGKAPKLLIYAASSLQSGVPSRFSGSGSGTDFTLTISSLQPEDFATYYCQQDNGYPSTFGGGTKVEIKR

SEQ ID NO: 1032 - protein, 158 aa, Artificial Sequence
  Synthetic
QGQSGSGIALCPSHFCQLPQTGGGSSGGSGGSGGISSGLLSGRSGNHGGSDIQMTQSPSSLSASVGDRVTITCRASQSISSYLNWYQQKPGKAPKLLIYAASSLQSGVPSRFSGSGSGTDFTLTISSLQPEDFATYYCQQDNGYPSTFGGGTKVEIKR

SEQ ID NO: 1033 - protein, 152 aa, Artificial Sequence
  Synthetic
GIALCPSHFCQLPQTGGGSSGGSGGSGGISSGLLSGRSGNHGGSDIQMTQSPSSLSASVGDRVTITCRASQSISSYLNWYQQKPGKAPKLLIYAASSLQSGVPSRFSGSGSGTDFTLTISSLQPEDFATYYCQQDNGYPSTFGGGTKVEIKR

SEQ ID NO: 1034 - protein, 160 aa, Artificial Sequence
  Synthetic
QGQSGSGIALCPSHFCQLPQTGGGSSGGSGGSGGISSGLLSGRSANPRGGGSDIQMTQSPSSLSASVGDRVTITCRASQSISSYLNWYQQKPGKAPKLLIYAASSLQSGVPSRFSGSGSGTDFTLTISSLQPEDFATYYCQQDNGYPSTFGGGTKVEIKR

SEQ ID NO: 1035 - protein, 154 aa, Artificial Sequence
  Synthetic
GIALCPSHFCQLPQTGGGSSGGSGGSGGISSGLLSGRSANPRGGGSDIQMTQSPSSLSASVGDRVTITCRASQSISSYLNWYQQKPGKAPKLLIYAASSLQSGVPSRFSGSGSGTDFTLTISSLQPEDFATYYCQQDNGYPSTFGGGTKVEIKR

SEQ ID NO: 1036 - protein, 163 aa, Artificial Sequence
  Synthetic
QGQSGSGIALCPSHFCQLPQTGGGSSGGSGGSGGAVGLLAPPTSGRSANPRGGGSDIQMTQSPSSLSASVGDRVTITCRASQSISSYLNWYQQKPGKAPKLLIYAASSLQSGVPSRFSGSGSGTDFTLTISSLQPEDFATYYCQQDNGYPSTFGGGTKVEIKR

SEQ ID NO: 1037 - protein, 157 aa, Artificial Sequence
  Synthetic
GIALCPSHFCQLPQTGGGSSGGSGGSGGAVGLLAPPTSGRSANPRGGGSDIQMTQSPSSLSASVGDRVTITCRASQSISSYLNWYQQKPGKAPKLLIYAASSLQSGVPSRFSGSGSGTDFTLTISSLQPEDFATYYCQQDNGYPSTFGGGTKVEIKR

SEQ ID NO: 1038 - protein, 162 aa, Artificial Sequence
  Synthetic
QGQSGSGIALCPSHFCQLPQTGGGSSGGSGGSGGAVGLLAPPSGRSANPRGGGSDIQMTQSPSSLSASVGDRVTITCRASQSISSYLNWYQQKPGKAPKLLIYAASSLQSGVPSRFSGSGSGTDFTLTISSLQPEDFATYYCQQDNGYPSTFGGGTKVEIKR

SEQ ID NO: 1039 - protein, 156 aa, Artificial Sequence
  Synthetic
GIALCPSHFCQLPQTGGGSSGGSGGSGGAVGLLAPPSGRSANPRGGGSDIQMTQSPSSLSASVGDRVTITCRASQSISSYLNWYQQKPGKAPKLLIYAASSLQSGVPSRFSGSGSGTDFTLTISSLQPEDFATYYCQQDNGYPSTFGGGTKVEIKR

SEQ ID NO: 1040 - protein, 158 aa, Artificial Sequence
  Synthetic
QGQSGSGIALCPSHFCQLPQTGGGSSGGSGGSGGISSGLLSGRSDDHGGSDIQMTQSPSSLSASVGDRVTITCRASQSISSYLNWYQQKPGKAPKLLIYAASSLQSGVPSRFSGSGSGTDFTLTISSLQPEDFATYYCQQDNGYPSTFGGGTKVEIKR

SEQ ID NO: 1041 - protein, 152 aa, Artificial Sequence
  Synthetic
GIALCPSHFCQLPQTGGGSSGGSGGSGGISSGLLSGRSDDHGGSDIQMTQSPSSLSASVGDRVTITCRASQSISSYLNWYQQKPGKAPKLLIYAASSLQSGVPSRFSGSGSGTDFTLTISSLQPEDFATYYCQQDNGYPSTFGGGTKVEIKR

SEQ ID NO: 1042 - protein, 158 aa, Artificial Sequence
  Synthetic
QGQSGSGIALCPSHFCQLPQTGGGSSGGSGGSGGISSGLLSGRSDIHGGSDIQMTQSPSSLSASVGDRVTITCRASQSISSYLNWYQQKPGKAPKLLIYAASSLQSGVPSRFSGSGSGTDFTLTISSLQPEDFATYYCQQDNGYPSTFGGGTKVEIKR

SEQ ID NO: 1043 - protein, 152 aa, Artificial Sequence
  Synthetic
GIALCPSHFCQLPQTGGGSSGGSGGSGGISSGLLSGRSDIHGGSDIQMTQSPSSLSASVGDRVTITCRASQSISSYLNWYQQKPGKAPKLLIYAASSLQSGVPSRFSGSGSGTDFTLTISSLQPEDFATYYCQQDNGYPSTFGGGTKVEIKR

SEQ ID NO: 1044 - protein, 158 aa, Artificial Sequence
  Synthetic
QGQSGSGIALCPSHFCQLPQTGGGSSGGSGGSGGISSGLLSGRSDQHGGSDIQMTQSPSSLSASVGDRVTITCRASQSISSYLNWYQQKPGKAPKLLIYAASSLQSGVPSRFSGSGSGTDFTLTISSLQPEDFATYYCQQDNGYPSTFGGGTKVEIKR

SEQ ID NO: 1045 - protein, 152 aa, Artificial Sequence
  Synthetic
GIALCPSHFCQLPQTGGGSSGGSGGSGGISSGLLSGRSDQHGGSDIQMTQSPSSLSASVGDRVTITCRASQSISSYLNWYQQKPGKAPKLLIYAASSLQSGVPSRFSGSGSGTDFTLTISSLQPEDFATYYCQQDNGYPSTFGGGTKVEIKR

SEQ ID NO: 1046 - protein, 158 aa, Artificial Sequence
  Synthetic
QGQSGSGIALCPSHFCQLPQTGGGSSGGSGGSGGISSGLLSGRSDTHGGSDIQMTQSPSSLSASVGDRVTITCRASQSISSYLNWYQQKPGKAPKLLIYAASSLQSGVPSRFSGSGSGTDFTLTISSLQPEDFATYYCQQDNGYPSTFGGGTKVEIKR

SEQ ID NO: 1047 - protein, 152 aa, Artificial Sequence
  Synthetic
GIALCPSHFCQLPQTGGGSSGGSGGSGGISSGLLSGRSDTHGGSDIQMTQSPSSLSASVGDRVTITCRASQSISSYLNWYQQKPGKAPKLLIYAASSLQSGVPSRFSGSGSGTDFTLTISSLQPEDFATYYCQQDNGYPSTFGGGTKVEIKR

SEQ ID NO: 1048 - protein, 158 aa, Artificial Sequence
  Synthetic
QGQSGSGIALCPSHFCQLPQTGGGSSGGSGGSGGISSGLLSGRSDYHGGSDIQMTQSPSSLSASVGDRVTITCRASQSISSYLNWYQQKPGKAPKLLIYAASSLQSGVPSRFSGSGSGTDFTLTISSLQPEDFATYYCQQDNGYPSTFGGGTKVEIKR

SEQ ID NO: 1049 - protein, 152 aa, Artificial Sequence
  Synthetic
GIALCPSHFCQLPQTGGGSSGGSGGSGGISSGLLSGRSDYHGGSDIQMTQSPSSLSASVGDRVTITCRASQSISSYLNWYQQKPGKAPKLLIYAASSLQSGVPSRFSGSGSGTDFTLTISSLQPEDFATYYCQQDNGYPSTFGGGTKVEIKR

SEQ ID NO: 1050 - protein, 158 aa, Artificial Sequence
  Synthetic
QGQSGSGIALCPSHFCQLPQTGGGSSGGSGGSGGISSGLLSGRSDNPGGSDIQMTQSPSSLSASVGDRVTITCRASQSISSYLNWYQQKPGKAPKLLIYAASSLQSGVPSRFSGSGSGTDFTLTISSLQPEDFATYYCQQDNGYPSTFGGGTKVEIKR

SEQ ID NO: 1051 - protein, 152 aa, Artificial Sequence
  Synthetic
GIALCPSHFCQLPQTGGGSSGGSGGSGGISSGLLSGRSDNPGGSDIQMTQSPSSLSASVGDRVTITCRASQSISSYLNWYQQKPGKAPKLLIYAASSLQSGVPSRFSGSGSGTDFTLTISSLQPEDFATYYCQQDNGYPSTFGGGTKVEIKR

SEQ ID NO: 1052 - protein, 158 aa, Artificial Sequence
  Synthetic
QGQSGSGIALCPSHFCQLPQTGGGSSGGSGGSGGISSGLLSGRSANPGGSDIQMTQSPSSLSASVGDRVTITCRASQSISSYLNWYQQKPGKAPKLLIYAASSLQSGVPSRFSGSGSGTDFTLTISSLQPEDFATYYCQQDNGYPSTFGGGTKVEIKR

SEQ ID NO: 1053 - protein, 152 aa, Artificial Sequence
  Synthetic
GIALCPSHFCQLPQTGGGSSGGSGGSGGISSGLLSGRSANPGGSDIQMTQSPSSLSASVGDRVTITCRASQSISSYLNWYQQKPGKAPKLLIYAASSLQSGVPSRFSGSGSGTDFTLTISSLQPEDFATYYCQQDNGYPSTFGGGTKVEIKR

SEQ ID NO: 1054 - protein, 158 aa, Artificial Sequence
  Synthetic
QGQSGSGIALCPSHFCQLPQTGGGSSGGSGGSGGISSGLLSGRSANIGGSDIQMTQSPSSLSASVGDRVTITCRASQSISSYLNWYQQKPGKAPKLLIYAASSLQSGVPSRFSGSGSGTDFTLTISSLQPEDFATYYCQQDNGYPSTFGGGTKVEIKR

SEQ ID NO: 1055 - protein, 152 aa, Artificial Sequence
  Synthetic
GIALCPSHFCQLPQTGGGSSGGSGGSGGISSGLLSGRSANIGGSDIQMTQSPSSLSASVGDRVTITCRASQSISSYLNWYQQKPGKAPKLLIYAASSLQSGVPSRFSGSGSGTDFTLTISSLQPEDFATYYCQQDNGYPSTFGGGTKVEIKR

SEQ ID NO: 1056 - protein, 158 aa, Artificial Sequence
  Synthetic
QGQSGSGIALCPSHFCQLPQTGGGSSGGSGGSGGISSGLLSGRSDNIGGSDIQMTQSPSSLSASVGDRVTITCRASQSISSYLNWYQQKPGKAPKLLIYAASSLQSGVPSRFSGSGSGTDFTLTISSLQPEDFATYYCQQDNGYPSTFGGGTKVEIKR

SEQ ID NO: 1057 - protein, 152 aa, Artificial Sequence
  Synthetic
GIALCPSHFCQLPQTGGGSSGGSGGSGGISSGLLSGRSDNIGGSDIQMTQSPSSLSASVGDRVTITCRASQSISSYLNWYQQKPGKAPKLLIYAASSLQSGVPSRFSGSGSGTDFTLTISSLQPEDFATYYCQQDNGYPSTFGGGTKVEIKR

SEQ ID NO: 1058 - protein, 167 aa, Artificial Sequence
  Synthetic
QGQSGSGIALCPSHFCQLPQTGGGSSGGSGGSGGAVGLLAPPGGTSTSGRSANPRGGGSDIQMTQSPSSLSASVGDRVTITCRASQSISSYLNWYQQKPGKAPKLLIYAASSLQSGVPSRFSGSGSGTDFTLTISSLQPEDFATYYCQQDNGYPSTFGGGTKVEIKR

SEQ ID NO: 1059 - protein, 161 aa, Artificial Sequence
  Synthetic
GIALCPSHFCQLPQTGGGSSGGSGGSGGAVGLLAPPGGTSTSGRSANPRGGGSDIQMTQSPSSLSASVGDRVTITCRASQSISSYLNWYQQKPGKAPKLLIYAASSLQSGVPSRFSGSGSGTDFTLTISSLQPEDFATYYCQQDNGYPSTFGGGTKVEIKR

SEQ ID NO: 1060 - DNA, 720 bp, Artificial Sequence
  Synthetic
gaggtgcagctgttggagtctgggggaggcttggtacagcctggggggtccctgagactctcctgtgcagcctctggattcacctttagcagctatgccatgagctgggtccgccaggctccagggaaggggctggagtgggtctcagatattactgcgtcgggttagaggacaacgtacgcagactccgtgaagggccggttcaccatctccagagacaattccaagaacacgctgtatctgcaaatgaacagcctgagagccgaggacacggccgtatattactgtgcgagatcgaagattgcttttgactactggggccagggaaccctggtcaccgtctcgagcggtggaggcggttcaggcggaggtggcagcggcggtggcgggtcgacggacatccagatgacccagtctccatcctccctgtctgcatctgtaggagacagagtcaccatcacttgccgggcaagtcagagcattagcagctatttaaattggtatcagcagaaaccagggaaagcccctaagctcctgatctataaggcatcccgtttgcaaagtggggtcccatcaaggttcagtggcagtggatctgggacagatttcactctcaccatcagcagtctgcaacctgaagattttgcaacttactactgtcaacagcgtgcgcttaagcctgtgacgttcggccaagggaccaaggtggaaatcaaacgg

SEQ ID NO: 1061 - protein, 240 aa, Artificial Sequence
  Synthetic
EVQLLESGGGLVQPGGSLRLSCAASGFTFSSYAMSWVRQAPGKGLEWVSDITASGQRTTYADSVKGRFTISRDNSKNTLYLQMNSLRAEDTAVYYCARSKIAFDYWGQGTLVTVSSGGGGSGGGGSGGGGSTDIQMTQSPSSLSASVGDRVTITCRASQSISSYLNWYQQKPGKAPKLLIYKASRLQSGVPSRFSGSGSGTDFTLTISSLQPEDFATYYCQQRALKPVTFGQGTKVEIKR

SEQ ID NO: 1062 - DNA, 720 bp, Artificial Sequence
  Synthetic
gaggtgcagctgttggagtctgggggaggcttggtacagcctggggggtccctgagactatcctgtgcagcctctggattcacctttagcagctatgccatgagctgggtccgccaggctccagggaaggggctggagtgggtctcaagtattaataaggatggtcattatacaagttacgcagactccgtgaagggccggttcaccatctccagagacaattccaagaacacgctgtatctgcaaatgaacagcctgagagccgaggacacggccgtatattactgtgcgaaaaatcttgatgagtttgactactggggccagggaaccctggtcaccgtctcgagcggtggaggcggttcaggcggaggtggcagcggcggtggcgggtcgacggacatccagatgacccagtctccatcctccctgtctgcatctgtaggagacagagtcaccatcacttgccgggcaagtcagagcattagcagctatttaaattggtatcagcagaaaccagggaaagcccctaagctcctgatctatgctgcatccagtttgcaaagtggggtcccatcaaggttcagtggcagtggatctgggacagatttcactctcaccatcagcagtctgcaacctgaagattttgcaacttactactgtcaacagagttacagtacccctaatacgttcggccaagggaccaaggtggaaatcaaacgg

SEQ ID NO: 1063 - protein, 240 aa, Artificial Sequence
  Synthetic
EVQLLESGGGLVQPGGSLRLSCAASGFTFSSYAMSWVRQAPGKGLEWVSSINKDGHYTSYADSVKGRFTISRDNSKNTLYLQMNSLRAEDTAVYYCAKNLDEFDYWGQGTLVTVSSGGGGSGGGGSGGGGSTDIQMTQSPSSLSASVGDRVTITCRASQSISSYLNWYQQKPGKAPKLLIYAASSLQSGVPSRFSGSGSGTDFTLTISSLQPEDFATYYCQQSYSTPNTFGQGTKVEIKR

SEQ ID NO: 1064 - DNA, 720 bp, Artificial Sequence
  Synthetic
gaggtgcagctgttggagtctgggggaggcttggtacagcctggggggtccctgagactctcctgtgcagcctctggattcacctttagcagctatgccatgagctgggtccgccaggctccagggaaggggctggagtgggtctcatctattatggctactggtgctggtacattgtacgcagactccgtgaagggccggttcaccatctccagagacaattccaagaacacgctgtatctgcaaatgaacagcctgagagccgaggacacggccgtatattactgtgcgaaagatggtgcggggtttgactactggggccagggaaccctggtcaccgtctcgagcggtggaggcggttcaggcggaggtggcagcggcggtggcgggtcgacggacatccagatgacccagtctccatcctccctgtctgcatctgtaggagacagagtcaccatcacttgccgggcaagtcagagcattagcagctatttaaattggtatcagcagaaaccagggaaagcccctaagctcctgatctattctgcatcccagttgcaaagtggggtcccatcaaggttcagtggcagtggatctgggacagatttcactctcaccatcagcagtctgcaacctgaagattttgcaacttactactgtcaacaggcgaattcgcggccttctacgttcggccaagggaccaaggtggaaatcaaacgg

SEQ ID NO: 1065 - protein, 240 aa, Artificial Sequence
  Synthetic
EVQLLESGGGLVQPGGSLRLSCAASGFTFSSYAMSWVRQAPGKGLEWVSSIMATGAGTLYADSVKGRFTISRDNSKNTLYLQMNSLRAEDTAVYYCAKDGAGFDYWGQGTLVTVSSGGGGSGGGGSGGGGSTDIQMTQSPSSLSASVGDRVTITCRASQSISSYLNWYQQKPGKAPKLLIYSASQLQSGVPSRFSGSGSGTDFTLTISSLQPEDFATYYCQQANSRPSTFGQGTKVEIKR

SEQ ID NO: 1066 - DNA, 720 bp, Artificial Sequence
  Synthetic
gaggtgcagctgttggagtctgggggaggcttggtacagcctggggggtccctgagactctcctgtgcagcctctggattcacctttagcagctatgccatgagctgggtccgccaggctccagggaaggggctgtagtgggtctcaactattacttcttctggtgctgctacatattacgcagactccgtgaagggccggttcaccatctccagagacaattccaagaacacgctgtatctgcaaatgaacagcctgagagccgaggacacggccgtatattactgtgcgaaaaattatactggttttgactactggggccagggaaccctggtcaccgtctcgagcggtggaggcggttcaggcggaggtggcagcggcggtggcgggtcgacggacatccagatgacccagtctccatcctccctgtctgcatctgtaggagacagagtcaccatcacttgccgggcaagtcagagcattagcagctatttaaattggtatcagcagaaaccagggaaagcccctaagctcctgatctataatgcatcctccttgcaaagtggggtcccatcaaggttcagtggcagtggatctgggacagatttcactctcaccatcagcagtctgcaacctgaagattttgcaacttactactgtcaacagtatacttatggtcctggtacgttcggccaagggaccaaggtggaaatcaaacgg

SEQ ID NO: 1067 - protein, 240 aa, Artificial Sequence
  Synthetic
EVQLLESGGGLVQPGGSLRLSCAASGFTFSSYAMSWVRQAPGKGLQWVSTITSSGAATYYADSVKGRFTISRDNSKNTLYLQMNSLRAEDTAVYYCAKNYTGFDYWGQGTLVTVSSGGGGSGGGGSGGGGSTDIQMTQSPSSLSASVGDRVTITCRASQSISSYLNWYQQKPGKAPKLLIYNASSLQSGVPSRFSGSGSGTDFTLTISSLQPEDFATYYCQQYTYGPGTFGQGTKVEIKR

SEQ ID NO: 1068 - DNA, 720 bp, Artificial Sequence
  Synthetic
gaggtgcagctgttggagtctgggggaggcttggtacagcctggggggtccctgagactctcctgtgcagcctctggattcacctttagcagctatgccatgagctgggtccgccaggctccagggaaggggctggagtgggtctcaagtatttattctactggtggtgctacagcttacgcagactccgtgaagggccggttcaccatctccagagacaattccaagaacacgctgtatctgcaaatgaacagcctgagagccgaggacacggccgtatattactgtgcgaaatcttctgctggttttgactactggggccagggaaccctggtcaccgtctcgagcggtggaggcggttcaggcggaggtggcagcggcggtggcgggtcgacggacatccagatgacccagtctccatcctccctgtctgcatctgtaggagacagagtcaccatcacttgccgggcaagtcagagcattagcagctatttaaattggtatcagcagaaaccagggaaagcccctaagctcctgatctattatgcatccactttgcaaagtggggtcccatcaaggttcagtggcagtggatctgggacagatttcactctcaccatcagcagtctgcaacctgaagattttgcaacttactactgtcaacaggataatggttatccttctacgttcggccaagggaccaaggtggaaatcaaacgg

SEQ ID NO: 1069 - protein, 240 aa, Artificial Sequence
  Synthetic
EVQLLESGGGLVQPGGSLRLSCAASGFTFSSYAMSWVRQAPGKGLEWVSSIYSTGGATAYADSVKGRFTISRDNSKNTLYLQMNSLRAEDTAVYYCAKSSAGFDYWGQGTLVTVSSGGGGSGGGGSGGGGSTDIQMTQSPSSLSASVGDRVTITCRASQSISSYLNWYQQKPGKAPKLLIYYASTLQSGVPSRFSGSGSGTDFTLTISSLQPEDFATYYCQQDNGYPSTFGQGTKVEIKR

SEQ ID NO: 1070 - DNA, 1371 bp, Artificial Sequence
  Synthetic
gaagtgcagctgctcgaaagcggcggaggcttggtgcagccaggagggagcctgcgactgtcttgcgcagccagcggattcactttctcttcctatgccatgagctgggttcgacaggcacccggcaaaggtctcgagtgggtgtctagcatctggcgaaacggaatagttacagtgtatgccgatagcgtgaagggtcgctttactatttcacgggataattctaagaacaccctctacctgcaaatgaatagccttagggcagaagataccgccgtgtactactgtgccaaatggtccgcagcctttgactactggggccaggggacactggtgaccgtgtcctctgcatcaaccaaggggccatcagtgttcccactcgccccatcttccaagagtacttccggcggaaccgcagcccttggctgccttgttaaggactatttcccagaacccgtgaccgtaagttggaactctggcgcccttacttctggggtgcacaccttcccagcagtgttgcagtccagtggcctttactctctgtctagtgtagtgactgtgccttcctctagtctcggtacccagacctatatttgtaatgttaaccataagcccagcaatacaaaggttgataagaaagtggaacccaagagctgcgataagacacatacctgcccaccttgtccagctcccgagctgctgggcggaccctcagtctttctcttcccacctaaacccaaggatacccttatgatctccaggactcctgaggtgacctgcgttgtggtcgacgtgtcacatgaggaccctgaggtaaagtttaactggtacgtggacggtgtggaggtacataacgctaagactaagccacgagaggagcaatacgcttccacttacagggtggtcagcgtcctgaccgttctccatcaggactggctgaacgggaaggaatataagtgtaaggttagcaacaaagctctccctgcaccaatcgagaagacaatcagcaaggcaaaagggcagcctcgggaacctcaggtctacaccctccctcctagcagggaagagatgacaaagaaccaggtctctctcacctgcctggtgaaaggcttctatccatctgacattgctgtggagtgggaatccaacggccagcctgaaaataattataagaccacaccccccgtccttgattccgatggatctttcttcctgtacagtaaactcaccgtcgacaaatcacggtggcagcaaggtaacgtgttcagctgttctgtcatgcatgaggctctgcataaccattacacacaaaagtctttgtcattgtctccaggatgatgagaattcattgatcataatcagccataccac

SEQ ID NO: 1071 - protein, 445 aa, Artificial Sequence
  Synthetic
EVQLLESGGGLVQPGGSLRLSCAASGFTFSSYAMSWVRQAPGKGLEWVSSIWRNGIVTVYADSVKGRFTISRDNSKNTLYLQMNSLRAEDTAVYYCAKWSAAFDYWGQGTLVTVSSASTKGPSVFPLAPSSKSTSGGTAALGCLVKDYFPEPVTVSWNSGALTSGVHTFPAVLQSSGLYSLSSVVTVPSSSLGTQTYICNVNHKPSNTKVDKKVEPKSCDKTHTCPPCPAPELLGGPSVFLFPPKPKDTLMISRTPEVTCVVVDVSHEDPEVKFNWYVDGVEVHNAKTKPREEQYNSTYRVVSVLTVLHQDWLNGKEYKCKVSNKALPAPIEKTISKAKGQPREPQVYTLPPSREEMTKNQVSLTCLVKGFYPSDIAVEWESNGQPENNYKTTPPVLDSDGSFFLYSKLTVDKSRWQQGNVFSCSVMHEALHNHYTQKSLSLSPG

SEQ ID NO: 1072 - DNA, 1371 bp, Artificial Sequence; identical to SEQ ID NO: 1070
  Synthetic

SEQ ID NO: 1073 - protein, 445 aa, Artificial Sequence
  Synthetic
EVQLLESGGGLVQPGGSLRLSCAASGFTFSSYAMSWVRQAPGKGLEWVSSIWRNGIVTVYADSVKGRFTISRDNSKNTLYLQMNSLRAEDTAVYYCAKWSAAFDYWGQGTLVTVSSASTKGPSVFPLAPSSKSTSGGTAALGCLVKDYFPEPVTVSWNSGALTSGVHTFPAVLQSSGLYSLSSVVTVPSSSLGTQTYICNVNHKPSNTKVDKKVEPKSCDKTHTCPPCPAPELLGGPSVFLFPPKPKDTLMISRTPEVTCVVVDVSHEDPEVKFNWYVDGVEVHNAKTKPREEQYASTYRVVSVLTVLHQDWLNGKEYKCKVSNKALPAPIEKTISKAKGQPREPQVYTLPPSREEMTKNQVSLTCLVKGFYPSDIAVEWESNGQPENNYKTTPPVLDSDGSFFLYSKLTVDKSRWQQGNVFSCSVMHEALHNHYTQKSLSLSPG

SEQ ID NO: 1074 - protein, 445 aa, Artificial Sequence
  Synthetic
EVQLLESGGGLVQPGGSLRLSCAASGFTFSSYAMSWVRQAPGKGLEWVSSIWRNGIVTVYADSVKGRFTISRDNSKNTLYLQMNSLRAEDTAVYYCAKWSAAFDYWGQGTLVTVSSASTKGPSVFPLAPSSKSTSGGTAALGCLVKDYFPEPVTVSWNSGALTSGVHTFPAVLQSSGLYSLSSVVTVPSSSLGTQTYICNVNHKPSNTKVDKKVEPKSCDKTHTCPPCPAPELLGGPSVFLFPPKPKDTLMISRTPEVTCVVVDVSHEDPEVKFNWYVDGVEVHNAKTKPREEQYQSTYRVVSVLTVLHQDWLNGKEYKCKVSNKALPAPIEKTISKAKGQPREPQVYTLPPSREEMTKNQVSLTCLVKGFYPSDIAVEWESNGQPENNYKTTPPVLDSDGSFFLYSKLTVDKSRWQQGNVFSCSVMHEALHNHYTQKSLSLSPG

SEQ ID NO: 1075 - protein, 6 aa, Artificial Sequence
  Synthetic
QSMSSY

SEQ ID NO: 1076 - protein, 8 aa, Artificial Sequence
  Synthetic
GITVGTNY

SEQ ID NO: 1077 - protein, 7 aa, Artificial Sequence
  Synthetic
ISSGGNT

We claim:

1. A method for detecting an in vivo distribution of an activated binding polypeptide in a mammalian subject, the method comprising:
administrating to a mammalian subject a tracer dose of a radiolabeled activatable binding polypeptide,
wherein the radiolabeled activatable binding polypeptide comprises a radionuclide and an activatable binding polypeptide,
wherein the activatable binding polypeptide comprises a prodomain and a binding moiety, wherein the prodomain comprises a masking moiety and a cleavable moiety,
wherein, when the radiolabeled activatable binding polypeptide is activated, a radiolabeled activated binding polypeptide is generated that is capable of specifically binding, in vivo, a biological target; and
imaging the mammalian subject using positron emission tomography (PET) at a time point following administration of the tracer dose.

2. The method of embodiment 1, wherein the radionuclide is selected from the group consisting of ¹¹¹In, ¹³¹I, ¹²³I, ^{99m}Tc, ¹⁷⁷Lu, ⁸⁹Zr, ¹²⁴I, ⁶⁴Cu, ⁸⁶Y, ⁷⁰Br, ¹⁸F, and ⁶⁸Ga.

3. The method of any of claims 1-2, wherein the radionuclide is Zr⁸⁹ and wherein the activatable binding polypeptide is a ⁸⁹Zr-conjugated activatable binding polypeptide.

4. The method of any of claims 1-3, wherein the radiolabeled activatable binding polypeptide comprises a chelation moiety.

5. The method of claim 4, wherein the chelation moiety comprises a structure corresponding to a chelation agent selected from the group consisting of diethylenetraminepentaacetic acid, ethylenediaminetetraacetic acid, 1,4,7,10-tetraacetic acid, and deferoxamine.

6. The method of claim 5, wherein the chelation moiety comprises a structure corresponding to deferoxamine.

7. The method of any of claims 4-6, wherein the chelation moiety further comprises a succinyl substituent.

8. The method of any of claims 1-2, wherein the radiolabeled activatable binding polypeptide comprises an N-succinimidyl deferoxamine activatable binding polypeptide.

9. The method of claim 8, wherein the radionuclide is ⁸⁹Zr whereby the radiolabeled activatable binding polypeptide comprises an ⁸⁹Zr-N-succinimidyl deferoxamine activatable binding polypeptide.

10. The method of any of claims 1-9, wherein radionuclide is present in the activatable binding polypeptide at a radionuclide:activatable binding polypeptide conjugation ratio in the range of from about 0.5 to about 3.0, or from about 0.5 to about 2.0, or from about 0.5 to about 1.5.

11. The method of any of claims 1-10, wherein the activatable binding polypeptide further comprises an additional moiety conjugated thereto that imparts an additional property to the corresponding radiolabeled activated binding polypeptide, wherein the additional property is selected from the group consisting of extended half-life and cytotoxicity.

12. The method of claim 11, wherein the additional property is extended half-life.

13. The method of claim 12, wherein the additional moiety is selected from the group consisting of a polyethylene glycol moiety and a human serum albumin moiety.

14. The method of claim 11, wherein the additional property is cytotoxicity.

15. The method of claim 14, wherein the additional moiety comprises all or part of a toxin.

16. The method of any of claims 1-15, wherein the tracer dose comprises a quantity of the radiolabeled activatable binding polypeptide corresponding to a radiation activity in the range of from about 1 MBq to about 5 MBq, or from about 1 MBq to about 4.5 MBq, or from about 1 MBq to about 4 MBq, or from about 2 MBq to about 4 MBq.

17. The method of claim 16, wherein the tracer dose comprises a quantity of the radiolabeled activatable binding polypeptide corresponding to a radiation activity of about 3.7 MBq.

18. The method of any of claims 1-17, wherein the tracer dose further comprises water.

19. The method of claim 18, wherein the tracer dose further comprises 0.9% NaCl in water.

20. The method of any of claims 1-19, wherein the tracer dose comprises a composition that is stable after storage at a time temperature in the range of from about 2 to about 8° C. stable after a time period of at least about 1 month, or at least about 3 months, or at least about 6 months, or at least about 12 months with respect to one or more properties selected from the group consisting of concentration of aggregates, concentration of radiolabeled activatable binding polypeptide, pH, and radiochemical purity.

21. The method of claim 20, wherein the property is concentration of aggregates.

22. The method of any of claims 20-21, wherein the property is concentration of radiolabeled activatable binding polypeptide.

23. The method of any of claims 20-22, wherein the property is pH.

24. The method of any of claims 20-23, wherein the property is radiochemical purity.

25. The method of any of claims 1-24, wherein the tracer dose comprises the radiolabeled activatable binding polypeptide at a concentration in the range of from about 1 mg/ml to about 20 mg/ml, or from about 5 mg/ml to about 20 mg/ml, or from about 5 mg/ml to about 15 mg/ml, or from about 6 mg/ml to about 14 mg/ml, or from about 7 mg/ml to about 13 mg/ml, or from about 8 mg/ml to about 12 mg/ml, or from about 9 mg/ml to about 11 mg/ml.

26. The method of any of claims 1-25, further comprising administering a blocking dose to the mammalian subject, wherein the blocking dose comprises a corresponding non-radiolabeled activatable binding polypeptide.

27. The method of claim 26, wherein administration of the blocking dose precedes administration of the tracer dose.

28. The method of claim 26, wherein the blocking dose and tracer dose are administered as a single composition comprising the radiolabeled activatable binding polypeptide and the corresponding non-radiolabeled activatable binding polypeptide.

29. The method of any of claims 26-28, wherein the blocking dose comprises a quantity of the corresponding non-radiolabeled activatable binding polypeptide in the range of from about 0.1 mg/Kg to about 10 mg/Kg, or in the range of from about 0.2 mg/Kg to about 10 mg/Kg, or from about 0.3 mg/Kg to about 10 mg/Kg, or from about 0.01 mg/Kg to about 0.3 mg/Kg or from about 0.01 mg/Kg to about 0.2 mg/Kg, or from about 0.1 mg/Kg to about 0.1 mg/Kg.

30. The method of any of claims 26-28, wherein the blocking dose comprises a fixed dose of about 5 mg.

31. The method of any of claims 26-28, wherein the blocking dose comprises a dose of about 0.07 mg/Kg.

32. The method of any of claims 26-28, wherein the blocking dose comprises about 0.1 mg/Kg, or about 0.2 mg/Kg, or about 0.3 mg/Kg, or about 1 mg/Kg, or about 3 mg/Kg, or about 10 mg/Kg of the corresponding non-radiolabeled activatable binding polypeptide.

33. The method of any of claims 26-28, wherein the blocking dose comprises the corresponding non-radiolabeled activatable binding polypeptide in a quantity that is less than about 0.3 mg/Kg, or less than about 0.2 mg/Kg, or less than about 0.1 mg/Kg, but greater than about 0.01 mg/Kg.

34. The method of claim 32, wherein the blocking dose comprises about 0.1 mg/Kg of the corresponding non-radiolabeled activatable binding polypeptide.

35. The method of claim 32, wherein the blocking dose comprises about 0.2 mg/Kg of the corresponding non-radiolabeled activatable binding polypeptide.

36. The method of claim 32, wherein the blocking dose comprises about 0.3 mg/Kg of the corresponding non-radiolabeled activatable binding polypeptide.

37. The method of claim 32, wherein the blocking dose comprises about 1 mg/Kg of the corresponding non-radiolabeled activatable binding polypeptide.

38. The method of claim 32, wherein the blocking dose comprises about 3 mg/Kg of the corresponding non-radiolabeled activatable binding polypeptide.

39. The method of claim 32, wherein the blocking dose comprises about 10 mg/Kg of the corresponding non-radiolabeled activatable binding polypeptide.

40. The method of any of claims 1-39, wherein the imaging step occurs at a time point in the period of from about 1 day to about 10 days post tracer dose administration, or at a time point in the period of from about 2 days to about 10 days post tracer dose administration, or in the period of from about 2 days to about 9 days post tracer dose administration, or in the period of from about 2 days to about 8 days post tracer dose administration, or in the period of from about 2 days to about 7 days post tracer dose administration, or in the period of from about 3 days to about 10 days post tracer dose administration, or in the period of from about 3 days to about 9 days post tracer dose administration, or in the period of from about 3 days to about 8 days post tracer dose administration.

41. The method of claim 40, wherein the imaging step occurs at a time point in the period of from about 1 day to about 10 days post tracer dose administration.

42. The method of claim 40, wherein the imaging step occurs at a time point in the period of from about 2 days to about 9 days post tracer dose administration.

43. The method of claim 40, wherein the imaging step occurs at a time point in the period of from about 2 days to about 8 days post tracer dose administration.

44. The method of claim 40, wherein the imaging step occurs at a time point in the period of from about 2 days to about 7 days post tracer dose administration.

45. The method of claim 40, wherein the imaging step occurs at a time point in the period of from about 3 days to about 10 days post tracer dose administration.

46. The method of claim 40, wherein the imaging step occurs at a time point in the period of from about 3 days to about 9 days post tracer dose administration.

47. The method of claim 40, wherein the imaging step occurs at a time point in the period of from about 3 days to about 8 days post tracer dose administration.

48. The method of any of claims 1-39, wherein the mammalian subject is subjected to PET scanning at a time point corresponding to day 2, and/or day 4, and/or day 7 post tracer dose administration.

49. The method of claim 48, wherein the mammalian subject is subjected to PET scanning at a time point corresponding to day 2 post tracer dose administration.

50. The method of claim 48, wherein the mammalian subject is subjected to PET scanning at a time point corresponding to day 4 post tracer dose administration.

51. The method of claim 48, wherein the mammalian subject is subjected to PET scanning at a time point corresponding to day 7 post tracer dose administration.

52. The method of any of claims 1-51, wherein the mammalian subject has been diagnosed as having a cancer.

53. The method of any of claims 1-52, wherein the mammalian subject has a tumor.

54. The method of any of claims 1-53, wherein the imaging step results in a resulting PET scan that covers an area that includes one or more organs or tissue corresponding to the heart, blood, lung, liver, kidney, pancreas, stomach, ilium, colon, muscle, bone, skin, brain, thymus, brown adipose tissue (BAT), spleen, and/or tumor.

55. The method of any of claims 53-54, wherein a resulting PET scan covers an area that includes all or a portion of a tumor.

56. The method of any of claims 1-55, wherein the imaging step comprises whole body imaging.

57. The method of any of claims 1-56, wherein the CM comprises a substrate for one or more proteases selected from the group consisting of ADAM, an ADAM-like, or ADAMTS; an aspartate protease; an aspartic cathepsin; a caspase; a cysteine proteinase; a kallikrein-related peptidase (KLK); a metallo proteinase, bone morphogenetic protein 1 (BMP-1), and the like); a matrix metalloproteinase (MMP); a serine protease, a coagulation factor protease; elastase, Granzyme B, Guanidinobenzoatase, HtrA1, Human Neutrophil Elastase, Lactoferrin, Marapsin, NS3/4A, PACE4, Plasmin, prostate-specific antigen (PSA), tissue plasminogen activator (tPA), Thrombin, Tryptase, urokinase (uPA), and a Type II transmembrane Serine Protease (TTSP).

58. The method of any of claims 1-56, wherein the CM is a substrate for one or more proteases selected from the group consisting of a matrix metalloprotease (MMP), a thrombin, a neutrophil elastase, a cysteine protease, a legumain, and a serine protease.

59. The method of any of claim 1-56, wherein the CM comprises an amino acid sequence corresponding to an amino acid sequence selected from the group consisting of SEQ ID NOS: 1-67.

60. The method of any of claims 1-59, wherein the radiolabeled activatable binding polypeptide is a radiolabeled activatable antibody.

61. The method of claim 60, wherein the radiolabeled activatable antibody is a radiolabeled activatable anti-PDL-1 antibody.

62. The method of claim 61, wherein the radiolabeled activatable anti-PDL-1 antibody comprises:
(a) a variable heavy chain complementarity determining region 1 (VH CDR1) comprising the amino acid sequence of SEQ ID NO:425;
(b) a variable heavy chain complementarity determining region 2 (VH CDR2) comprising an amino acid sequence selected from the group consisting of SEQ ID NOs: 436, 428, 430, 432, 434, 436, and 443-452; and
(c) a variable heavy chain complementarity determining region 3 (VH CDR3) comprising an amino acid sequence selected from the group consisting of SEQ ID NOs: 427, 429, 431, 433, 435, 437, and 438-442.

63. The method of claim 62, where the radiolabeled activatable anti-PDL-1 antibody further comprises:
(d) a variable light chain complementarity determining region 1 (VL CDR1) comprising the amino acid sequence of SEQ ID NO:414;
(e) a variable light chain complementarity determining region 2 (VL CDR2) comprising an amino acid sequence selected from the group consisting of SEQ ID NOs:415, 417, 419, 421, and 423; and
(f) a variable light chain complementarity determining region 3 (VL CDR3) comprising an amino acid sequence selected from the group consisting of SEQ ID NOs:416, 418, 420, 422, and 424.

64. The method of any of claims 62-64, wherein
the VL CDR2 comprises the amino acid sequence of SEQ ID NO:417,
the VL CDR3 comprises the amino acid sequence of SEQ ID NO:424,
the VH CDR2 comprises the amino acid sequence of SEQ ID NO: 451, and
the VH CDR3 comprises the amino acid sequence of SEQ ID NO: 440.

65. The method of any of claims 62-63, wherein
the VL CDR2 comprises the amino acid sequence of SEQ ID NO:423,
the VL CDR3 comprises the amino acid sequence of SEQ ID NO:424,
the VH CDR2 comprises the amino acid sequence of SEQ ID NO:451, and
the VH CDR3 comprises the amino acid sequence of SEQ ID NO:440.

66. The method of claim 61, wherein the radiolabeled activatable anti-PDL-1 antibody comprises a variable light chain comprising the amino acid sequence of SEQ ID NO:112 and a variable heavy chain comprising the amino acid sequence of SEQ ID NO:146.

67. The method of any of claims 59-66, wherein the MM comprises an amino acid sequence selected from the group consisting of SEQ ID NOs:84-108.

68. The method of claim 67, wherein the MM comprises the amino acid sequence of SEQ ID NO:90.

69. The method of any of claims 59-68, wherein the CM comprises the amino acid sequence of SEQ ID NO:24.

70. The method of any of claims 61-63, wherein the radiolabeled activatable anti-PDL-1 antibody comprises a light chain amino acid sequence comprising the amino acid sequence of SEQ ID NO:971.

71. The method of any of claims 61-63, wherein the radiolabeled activatable anti-PDL-1 antibody comprises a light chain amino acid sequence corresponding to SEQ ID NO:969.

72. The method of any of claims 61-63, wherein the radiolabeled activatable anti-PDL-1 antibody comprises a light chain amino acid sequence corresponding to SEQ ID NO:170.

73. The method of any of claims 61-63, wherein the radiolabeled activatable anti-PDL-1 antibody comprises a light chain amino acid sequence corresponding to SEQ ID NO:168.

74. The method of any of claims 60-73, wherein the radiolabeled activatable anti-PDL-1 antibody comprises a heavy chain amino acid sequence corresponding to SEQ ID NO:146.

75. The method of any of claims 60-73, wherein the radiolabeled activatable anti-PDL-1 antibody comprises a heavy chain amino acid sequence comprising the amino acid sequence of SEQ ID NO:172.

76. The method of claim 61, wherein the radiolabeled activatable anti-PDL-1 antibody comprises a light chain amino acid sequence comprising the amino acid sequence of SEQ ID NO:168 and a heavy chain amino acid sequence comprising the amino acid sequence of SEQ ID NO: 172.

77. The method of claim 61, wherein the radiolabeled activatable anti-PDL-1 antibody comprises a light chain amino acid sequence comprising the amino acid sequence of SEQ ED NO:169 and a heavy chain amino acid sequence comprising the amino acid sequence of SEQ ID NO:172.

78. A method for identifying a mammalian subject suitable for treatment with an activatable binding polypeptide, the method comprising:
detecting the in vivo distribution of an activated binding polypeptide in a mammalian subject in accordance with the method of any of claims 1-77, and
identifying the mammalian subject as being suitable for treatment with the activatable binding polypeptide if (a) the radionuclide is detectably present within the PET image of the tumor.

79. The method of claim 78, wherein the step of identifying the mammalian subject as being suitable for treatment with the activatable binding polypeptide further comprises (b) obtaining a tumor tissue sample from the subject.

80. A method of treating a mammalian subject with an activatable binding polypeptide, the method comprising:
identifying a mammalian subject suitable for treatment with an activatable binding polypeptide in accordance with any of claims 78-79; and
administering to the mammalian subject a therapeutically effective dose of the activatable binding polypeptide.

81. A ⁸⁹Zr-conjugated activatable binding polypeptide,
wherein the ⁸⁹Zr-conjugated activatable binding polypeptide comprises ⁸⁹Zr conjugated via a chelation moiety to an activatable binding polypeptide,
wherein the activatable binding polypeptide comprises a prodomain and a binding moiety, wherein the prodomain comprises a masking moiety and a cleavable moiety,
wherein, when the ⁸⁹Zr-conjugated activatable binding polypeptide is activated, a ⁸⁹Zr-conjugated activated binding polypeptide is generated that is capable of specifically binding, in vivo, a biological target.

82. The ⁸⁹Zr-conjugated activatable binding polypeptide of claim 81, wherein the radiolabeled activatable binding polypeptide comprises a deferoxamine moiety.

83. The ⁸⁹Zr-conjugated activatable binding polypeptide of claim 82, wherein the desferoxamine moiety comprises succinimidyl desferal and wherein the Zr⁸⁹-conjugated activatable binding polypeptide is an N-succinimidyl deferoxamine activatable binding polypeptide.

84. The ⁸⁹Zr-conjugated activatable binding polypeptide of any of claims 81-83, wherein the conjugation ratio is in the range of from about 0.5 to about 3.0, or from about 0.5 to about 2.0, or from about 0.5 to about 1.5.

85. The ⁸⁹Zr-conjugated activatable binding polypeptide of claim 84, wherein the conjugation ratio is in the range of from about 0.5 to about 2.0.

86. The ⁸⁹Zr-conjugated activatable binding polypeptide of any of claims 81-85, wherein the ⁸⁹Zr-conjugated activatable binding polypeptide further comprises an additional moiety conjugated thereto that imparts an additional property to the corresponding radiolabelled activated binding polypeptide, wherein the additional property is selected from the group consisting of extended half-life and cytotoxicity.

87. The ⁸⁹Zr-conjugated activatable binding polypeptide of claim 86, wherein the additional property is extended half-life.

88. The ⁸⁹Zr-conjugated activatable binding polypeptide of claim 87, wherein the additional moiety is selected from the group consisting of a polyethylene glycol moiety and a human serum albumin moiety.

89. The ⁸⁹Zr-conjugated activatable binding polypeptide of claim 86, wherein the additional property is cytotoxicity.

90. The ⁸⁹Zr-conjugated activatable binding polypeptide of claim 89, wherein the additional moiety comprises all or part of a toxin.

91. The ⁸⁹Zr-conjugated activatable binding polypeptide of any of claims 81-90, wherein the ⁸⁹Zr-conjugated activatable binding polypeptide is an ⁸⁹Zr-conjugated anti-PDL-1 activatable antibody.

92. The ⁸⁹Zr-conjugated activatable binding polypeptide of claim 91, wherein the ⁸⁹Zr-conjugated anti-PDL-1 activatable antibody comprises:
(a) a variable heavy chain complementarity determining region 1 (VH CDR1) comprising the amino acid sequence of SEQ ID NO:425;
(b) a variable heavy chain complementarity determining region 2 (VH CDR2) comprising an amino acid sequence selected from the group consisting of SEQ ID NOs:426, 428, 430, 432, 434, 436, and 438-442; and
(c) a variable heavy chain complementarity determining region 3 (VH CDR3) comprising an amino acid sequence selected from the group consisting of SEQ ID NOs: 429, 431, 433, 435, 437, and 438-442.

93. The ⁸⁹Zr-conjugated activatable binding polypeptide of claim 90, wherein the ⁸⁹Zr-conjugated anti-PDL-1 activatable antibody further comprises:
(d) a variable light chain complementarity determining region 1 (VL CDR1) comprising the amino acid sequence of SEQ ID NO: 414;
(e) a variable light chain complementarity determining region 2 (VL CDR2) comprising an amino acid sequence selected from the group consisting of SEQ ID NOs:415, 417, 419, 421, and 423; and
(f) a variable light chain complementarity determining region 3 (VL CDR3) comprising an amino acid sequence selected from the group consisting of SEQ ID NOs:416, 418, 420, 422, and 424.

94. The ⁸⁹Zr-conjugated activatable binding polypeptide of any of claims 92-93, wherein
the VL CDR2 comprises the amino acid sequence of SEQ ID NO:417,
the VL CDR3 comprises the amino acid sequence of SEQ ID NO:424
the VH CDR2 comprises the amino acid sequence of SEQ ID NO: 451, and
the VH CDR3 comprises the amino acid sequence of SEQ ID NO:440.

95. The ⁸⁹Zr-conjugated activatable binding polypeptide method of any of claims 92-93, wherein
the VL CDR2 comprises the amino acid sequence of SEQ ID NO:423,
the VL CDR3 comprises the amino acid sequence of SEQ ID NO:424,
the VH CDR2 comprises the amino acid sequence of SEQ ID NO:451, and
the VH CDR3 comprises the amino acid sequence of SEQ ID NO:440.

96. The ⁸⁹Zr-conjugated activatable binding polypeptide method of claim 91, wherein the radiolabeled activatable antibody comprises a variable light chain comprising the amino acid sequence of SEQ ID NO:112 and a variable heavy chain comprising the amino acid sequence of SEQ ID N):146.

97. The ⁸⁹Zr-conjugated activatable binding polypeptide method of any of claims 91-96, wherein the MM comprises an amino acid sequence selected from the group consisting of SEQ ID NOs:84-108.

98. The ⁸⁹Zr-conjugated activatable binding polypeptide method of claim 97, wherein the MM comprises an amino acid sequence corresponding to SEQ ID NO:90.

99. The ⁸⁹Zr-conjugated activatable binding polypeptide method of any of claims 91-98, wherein the CM comprises an amino acid sequence corresponding to SEQ ID NO:24.

100. The ⁸⁹Zr-conjugated activatable binding polypeptide method of any of claims 91-93, wherein the radiolabeled activatable antibody comprises a light chain amino acid sequence corresponding to SEQ ID NO:971.

101. The ⁸⁹Zr-conjugated activatable binding polypeptide method of any of claims 91-93, wherein the radiolabeled activatable antibody comprises a light chain amino acid sequence corresponding to SEQ ID NO:969.

102. The ⁸⁹Zr-conjugated activatable binding polypeptide method of any of claims 91-93, wherein the radiolabeled activatable antibody comprises a light chain amino acid sequence corresponding to SEQ ID NO:170.

103. The ⁸⁹Zr-conjugated activatable binding polypeptide method of any of claims 91-93, wherein the radiolabeled activatable antibody comprises a light chain amino acid sequence corresponding to SEQ ID NO:168.

104. The ⁸⁹Zr-conjugated activatable binding polypeptide method of any of claims 91-103, wherein the radiolabeled activatable antibody comprises a heavy chain amino acid sequence comprising the amino acid sequence of SEQ ID NO:146.

105. The ⁸⁹Zr-conjugated activatable binding polypeptide method of any of claims 91-93, wherein the radiolabeled activatable antibody comprises a heavy chain amino acid sequence comprising the amino acid sequence of SEQ ID NO:172.

106. The ⁸⁹Zr-conjugated activatable binding polypeptide of claim 89, wherein the radiolabeled activatable antibody comprises a light chain amino acid sequence comprising the amino acid sequence of SEQ ID NO:168 and a heavy chain amino acid sequence comprising the amino acid sequence of SEQ ID NO:172.

107. The ⁸⁹Zr-conjugated activatable binding polypeptide of claim 91, wherein the radiolabeled activatable antibody comprises a light chain amino acid sequence comprising the amino acid sequence of SEQ ID NO:169 and a heavy chain amino acid sequence comprising the amino acid sequence of SEQ ID NO:172.

108. A stable composition comprising the ⁸⁹Zr-conjugated activatable binding polypeptide of any of claims 91-107 and a liquid phase carrier, wherein the composition is stable after storage at a temperature in the range of from about 2′C to about 8° C. after a time period of at least about 1 month, or at least about 3 months, or at least about 6 months, or at least about 12 months, with respect to at least one property selected from the group consisting of percent (%) aggregates, concentration, pH, and radiochemical.

109. A tracer dose comprising the composition of claim 108, wherein the dose comprises a quantity of ⁸⁹Zr-conjugated activatable binding polypeptide corresponding to 37 MBq.

110. The tracer dose of claim 109, wherein the ⁸⁹Zr-conjugated activatable binding polypeptide is present at a concentration in the range of from about 1 mg/ml to about 20 mg/ml, or from about 5 mg/ml to about 20 mg/ml, or from about 5 mg/ml to about 15 mg/ml, or from about 6 mg/ml to about 14 mg/ml, or from about 7 mg/ml to about 13 mg/ml, or from about 8 mg/ml to about 12 mg/ml, or from about 9 mg/ml to about 11 mg/ml.

112. An ⁸⁹Zr-labeled activatable binding polypeptide for use as a tracer for positron emission tomography imaging a tumor in a mammalian subject.

113. The ⁸⁹Zr-labeled activatable binding polypeptide of claim 112, wherein the activatable binding polypeptide is an activatable antibody.

114. The ⁸⁹Zr-labeled activatable binding polypeptide of claim 113, wherein the activatable antibody is an activatable anti-PDL-1 antibody.

115. A composition comprising the ⁸⁹Zr-labeled activatable binding polypeptide of any of claims 112-114.
